United States Patent Application Publication US 2007/0054278 A1 - sequence listing, part 64

SEQ ID NO: 95540 - DNA, 39368 bp, Homo sapiens
atggagctatagtctagtgaggaaaatttatttttcataacgttagcatacgatgctcaataagctttggagaatgaatgaccaattaaaaatacctttctttcaagacctaggctttaagtttcctgcccaggctaaaaagtgtatggcatggctgggtgcagtggcttcacacctgcactttgggaggctgaaatgggtggattgcttgaggccaggagttcgagaccagcctggccaacatagtgaaacccccatctctaccaaaaatacaaaacttagctgggcgttgtggcacgggcctacagtcccagctactcgggaggctgaggcacaagaatcgcttgaacacaggaagtgaaggttgtagtgagctgagatcatgccactgcactccagcctgggcaacagagtgagactctgtctcaaaaaaattaaaagaaaaaaaaagtatatggcagcactaccaaattgagcccctttcttcttcacttaaaaattcagagaggatgctaccagatagatttgaatcaaataccgcgtggtgttaccagatccatcaggcttttggggaccctgttcatttcaaaataccccatgaaccttctttgctttcttctagagctggacctcattgaaacaccaagaaaacaaacagctctaacaccaggagtccaatatacttctgagtcctcacaatcgaccagagggacaaaattcagtggggtgtactagctttagaatcactgctcacaagaaacagtgtagcactttgttcatctggagtgcttcacacataaagacaaaaataaagacataactaaacatataataacacatacaaataaaggtgttattttaaaacatataaagaaatatgtcacataccaatttatacataaacaaataagtgaaaaaatatatatcatgtgtgtagtgctgtttgcctgtctaaggtgttattcccagggcatgtaagaagtaaacatatatatacacacatacacacattaacatacatatacatattctttaataaaaatattttttaaatattctttcatcaactccagactcacactttctcacattttaacatctctaaaattggaatgcattttacaatctaaggcacttaacaattcaactggaagtgtttaaccttagcaatgtatgtaatgatgcatcttacaacagaggtgctttaggttcaataaattatggaaggctaactctacaataggtatttcttcatatatttgagagcaaacatcttattcctaaagagtcttcaagcagagaatcctgagtgctcgtatgatagagaaaaaaactctactaatatacagcagggcagctattttggagataacctggcagtacacttagttaaatgaaggagacatttatatatgtcaaagacatgctcacagaggtccagaagagaaatgtctaatgctgcatgtgttgcaaggagctggaggcaatctggatgcctagcaatgtaggagtagaaagactggtagacgcacacaaagaattatataagagttggaagcaaaggactagatgtatacaaagtaatagataacttcaaaaacagtgctgagtaggaaaaaagagatgagaactaaaacaaagcatataatttacatttctgtaaagttaaaagatacacattctcaagaatacatgtaaacaaaacattaaaatgtttgcattaagaaatggaatgagctataggaatgaaaagaataaatacattagaaaaacagcagcctttcagggatcaatgatgattatgtgtcaaactcaggaacacgactattgcaatcttctacattttcagtcaaactagaaaaccacaacaaaaactacactaagcaccatggaagtagaaaaataataatattgtgctgagtaagtatagctacaaataaaataatatgtaaataataagtttattattagtatacaccaagcatctatgagcttacatacattgattaatcctcccgataattccacggaataaatactattatcattttataggaaatcacggaataaaaacattaaggaatttagtaaggctggaattcaaaacccaaactgtgtgcatctagaactgtaatttggatttgttacactagagagcctgtcatgaatcaaccaacatttctataatataaagcttacacctaaaaagaagcaaagccattgacaaccaaggacaatgcaagttgaaaacaaataatacaagaggtggctgaacaaaatgtaagtctggatatggtatacaggtggcacttaaaaaaatacttgttgactgagtgggtgaattaatgaatgggagataacctcaggtttcttcaatgagttgcactaaggtctggagaggtgaaggtagatggagttcatgtgaaatgcaaaaagagtaagggaatagggatgggaaaccactggatgcatggataaactaccaagtgacctagactaggtaggtgactgtatagggtacctaaaagaaagtgtttggagcttcacttttgtagagtataggctttagacttcctaggtttgaatcctatctggctctatcactttcatctgaatggccttgggtatgctattaaccacctagtggctttgtttaatcagagcaaaatggggttcagtcattcatttaagaaatagctgggcacttaatttgtgtcaggcaccgttctaagtgctggaaatacaaccatgaatacaaaaacatccccgtcctcatggacctcatagtctattcacagacaaataacaaacaaattcagtccgatggccataaaaggcacagaaaatgaaagggatgaaacagataaggatgctatgttagttgaaaacaacaacggctaatacgtcttgtgtgcttatttttttttctcccctcaaaatttgtatattgaaacctaatcaccaatgtgagtagcaggaagttggggcctttggggtgattaggttataagggtagaaccctcactgttgggattggtgcccttataaaagtgatcccagagagctagctgggcatggtggggagcacttgtaatcccagctacgtgggagactgaggcaggagaattgcttgaacccaagaggtggaggttgcagtgagccaagattgtgccactgaactccagcctgggtgacagagcaagactgtctccaacaacaacaacaaaaaacaacaaaatacctcatatgttagattttttaaattgagcctacaaaagtaatttatccatatctacgtttaaatcactccatatttcaatacttaaattattattattatttttttgagatagggtctcactctgttacccaggctggagtgcagtggtacgatctcagctcactgcaatgtctgcccccggattcaagtgattctcccgcctcagcctcggaagtagctgggcctgcaggcgcagcaccactacgcggggctattttatttttttagtagcaagggtggtctcaccatgttgctcagggtagtctcgaactcctgagcttggagcaatccactggcctcagcatccaaagtgctggaattacaggtgtgagccaccgcacttggcctccaattattattattattattattactagtttttgagagtcttgctgtgttgcccaggctggagtgcagtggcacgattgtggctcactgcaaactctgcctcctgggttcaagcaattctcctgcctcagcctcccgagcagctgggattacaggcacccaccatcatggctggctaattttttttttttttttttttttaagtagagctggggtttcacaatgttggccaggttggtctcaaactcctgacctcaggtgatcccaactgacagataaaactgtgtgtatatgtcatgtacaacataatgttttgaagtatacgtacattgtgaaatggttaactctagctaattaaaaaatgttttacctcacatagttattttagtaatgagaacacttaacatctgctgtgtttttcaaaaacacaatgttttccaagattacaatgtcattaactatagccaccatgctgtccaatagatctcttgaatgtattcctcctattcaactgtaattatgtatcctttgaccaacatctccccaaccctccttcacccctaaccacgccagcccttggtaaccaccattctattctctacttctatgaacaccaaaattatttaaaggctgtacttgtcaagaaatataaatgtatcatttcaagttcagataatgtgtgtatttaattcttatttacctgccgtttgaagacaataaagcatatagaacacaaaatttaaacctgatcttacctttgtaagataatccactttcaaattgtcgatcatcatagttttctgggatagctcaatttttagtaactgaatattatgaagtagttcttttcgttcaattagctgcctggtgattctgactttgccctctcgctcttctgatgaggaaatatcatccgtaggaactgttgtttctaaactaatatcttcagattccagagaactagagatgttcactttttttgactcctttgaaatttttcgagacatttttattattatggatcagttttcttctctaatttgattttaatattctgtaggttaaaaaacattaattcaaatgtactataaaattaactacagaaatcatggactgtattaaagagagactaaggattccttaaataaatattaggcaatttactgcatcccaaatctagaacagattattgcagttaagttaatgctcaaatcaaacacattaattcctaatatgaagtcagccttcgagaaacttaaaaaaacagttcctgcggggaggaatcttacttggaggaaacaaagaaatgtacaagatgaagaaaaaagcccattataatcaagaatggcaccactaaaaccaacacatgctcaaagataacagaaatcacgtctgagttggtcagggaaacgttacacagaggtagcacttagaatctttaaagatttggacaggcatggtaaaaaggagaaatcatgcagttattaatgatacgtaagtggaagtaaaaaaacaaagccaagtcttggaatagttactcctttcaccgcccccccaacacaaacacaaacacacacacacacacacacacacacacacgcccttaacgatcaagactggaaggccttaaatgtcaaaatagggttggattttattctacaggcaatgaggcatcattgaagatgttttaaatagggaaaacggggacaaaaacattttttatagatagcagaatgaaaacaacaggatataagaaaaattcaagaaattctaaatagaacttacttctaactctctcataagaatgttagcaactaccttgttttaatacctcatgatataacaaattatgctattaaatatttcagtttttctaaactgaatgataaggaaaggtgtgtggaggggaaacagcgagaactatactaagatcggcctccctccttctttttgaagggaaataggtaagaaaaagtgaattcaaagacaaattctctcctcgattacaaagggcccgagacggggactgcctatacactcggcgtgaaaattaagccccaaacttggcagctcgggggattccttgccccacgcgggaaagaaagcgatgatagtcgcaagttacctcgaaagtgtcaattactccacactgaagccttgaccagcagccagtgcagacaccgagggaccaaaggcgtctccggtcggaagcacaaggttgcaggccctcaacaagggatttcaaggcaggggaccgttaggacccgtaaccaagacaaccatctccgcacccgcaaggaggacagaaccagcactcccacaagccgccggaagtcaactctcccggatgttccgaggagcggaaagcaacacacgytgtgaggtggcgtccagaaggaagccccgcctaggccacgggcggaaatggctcctcgccttgctttgccgcccctccccactctcgcccaatccccgcggccgtcagagagccaaccaatgtttatctcggcattttcccgcgagaagtgttactaatatccgggaatggaaagggaagaacctccggggttaggcgtattctagattgacgccttttgctggaagagcgctgctggggttaggattctgcgcggcgaggcaagatgctcaagtccaagacgttcttaaaaaagacccgggcgggcggcgtgatgaagatcgtgcgcgagcactacctgcgagacgacatcggctgcggtgcgcccgggtgcgcagcgtgtggaggggcgcacgaggggccggccctggagccgcagccccaggacccggcgagcagcgtctgcccgcaaccgcactacttgctgcccgacactaatgtgttactgcaccaggtgcgtgggcgggcgaaccgcggacagcgcggccccacggggacaagggggtatgacagggaaactgaggcccagggaggcgggtctttggcagtgtcacatacctagcgaaagggaaaccccctcgggaccgaagcttcctgttccccaggccgaggttcttttccttgtgctttaaaaaatttagttcttggagtcgtagttcagacacgttatttttctaactcctggtgtctcttctgccttagattgtaagtgcctggaggccggggacctgggcttctgtggcctccagcctgcgactcccaggcagcttgtaagtgcctaggaacaaaaaactatgtgggccaacgtattcctttattaatacccttaattctacgaagtcttgtgattggtctgtttaagtgtgctttttttaatagatctgaagggtttagtgactattgtctcgttttctatagccaaatagcttcttggcttaacttattcagtgtttttaaaacataaagtatttatgcccaacataaaacaggattttatgtttgacagagctatttacaaatgaatataggraaaattaactttatctttctttaagattgatgttcttgaggaccctgccatcaggaatgtaattgtgctacaaacagttcttcaagaagtgagaaatcgcagtgcccccgtatataaacgcatccgagatgtgactaataaccaagagaagcatttctatactttcactaatgagcaccataggtaggaggaatattacgttaaatatcagaaaaccacaggattagcaaaattcgggagagggttcctgtgagtaatttatgacattgtcagaagataagtgatagatttcataccttatttaattcttacatggctgtgcagaagataatgctaagtggatctctctaaggtcacacaggcattgatgggctcaagcctaaaaccaaggtctgctgactcctagactacaataggtactttaatttccaaaatgttttcattttgaattggttttagcatgagttggaccatagaatcttggaagatgagatttgcttaagttcctggaataccatattatgtgaacaactaacagagggtaataaaatatatgagtttgtgaagtttctattttgtttaaaaatagaaagtagatttattcttaatggtctttttaaaagtttaatactttgcagctgattacattgagcaagattaggttaaggaatagaattctttttttttttttttttttttttttgagatggagtctcactctgtcacccaggctggagtgcagtggtgtgatctctgctcactgcaacctccacctcccaagttcaagcgattcttctgcctcagcctcctgagtagctgggattacagtcaygcaccactatgccaggctaatttttgtatttttagtagagacagggtttcaccatgttggtcaggctggtctcgaattcctgacctcgtgatccacctgcctcagcctctcaaagtggtgggattacargcatgagctaccgtgcctggccaggaatataattctttgttgtgcttttarattcaagacctttgaactcagtgtgtggtctcaaaaatatgatattgcctattacrttatattacataaataatctatgatgagtatggtacttttattggattagatcagggcttctcaatcttggcattatakatattttgaactgaataatttttttgtggtggaaaggctgttttatacattgtagtatgtttaacagtgttcctagcctatttggcaggatcaccaccccttaccccccccaccaccaccaccaccaccaccactcagttgtaatgatacaaaatgccctgaggggtgaattcactcaattgagaaccattggattagagtgtagacttctggtaatgaaattccatcagattatgcacatttttaaaaaccttaatatctcaactttcttgattcttatatctcaaacttcaatgttcttgtaaagaataccagtaaagcccttgtaggcttcttattgttagtacctccttgaaatccagaaatagcaacatcacttgtttttcagtgcagaaagacccaagtttaaaaccaattcaaaaatttatgactgtgtctttcactgatgagcttaaaacattagcagctgggcgtggtggcttatgtctgtaatcctggcactttgggaggttgaggtgggcagatcacttgaggccaggagttccagaccagcttagccaacctggaaaatccctgtctcttaaaaatacaaaaattagctggttatggtggtacatgcctctagtcccagctacttgcgaggctgagttgggaggatcacttgaacccggaggtagaggttgcagtaagctgagatcatgccactgcactccagcctgagctacagagcaagactctgtttcaaaaaaaaaaaaaaagcattagcaagtgcattcaacgatgaggaataaaataattctaaaactattaatataaatcaaattattaaattgaatctattaccattaagtactggaagctattgtagtgaactttgctgttgtacttaaacctggctttgatgaacagatttaaagaaatagatgaatgtgttgacatacttgggagtttagatagaagaaatacgtaatatctattaatatacctgacttttcagtctctacatagcttcagctattagtgtttaccatggataatttatatgcattatttattaatgactgtagaattctgattataaatgatctaattatactatttgtagcttttaggaattgctattaacctacagtttgaatgaaatctgattatcatacctgtgaaattgtattataatttgtcaacaaactattatttagtgtctcaacctaaagtataaattctgatcttgaatttttctttttaggaaataaaattgtattagcctttttcttgtccccttaataacataattttcttcttttccaagcaaattgtttcttaaaaacttaattataagaatcttgatttcttctctgaggtgtacatctgaatacattcaagagaaaagatataccattgactttttctagtttagtggttaagcatttatgtgctaagagttttcacatatccttgtttctactgatttccttttatttcgttttttctttccatttagagaaacctatgtagaacaagaacagggagaaaatgctaatgacaggaatgatagagcgattcgagtagcagcaaaatggtacaatgaacatttgaaaaaaatgtcagcagacaaccagctgcaagttatcttcataacaaatgacaggagaaacaaagagaaagccatagaagaaggaataccagctttcacttgtaagtctaaatgtagaagtacttagtgcatgtttgcaaatgcgtgtaaaaataatcattaggcctatagtcagatgttcactttactatttagtattttcgtagtcctatataacttcatgtgatatttttgtatttttaaatttcacatagtttttaacctaaatatgttgtgcccagtggctgttaattttcccctcactatttgcaactggtttagcaatgaaatctcataaatatactggaacccctgcttctgcttaggtatgatcacatcaacagatttttgggttttgttttttaaataaattgaggccaggtgctgtaatcccagcactttgggaggtcagggcaagaggcttgcttgagaccaggagttcaggaccagcctgggcaacatagggagactatagctctacaggaaaaaaaaaaaaagccgtgcatggtagtatgtaactatagtcccagctactcgggaggctaaggcaggaaggtagcttgagcccagggattctaggctgtagtgatgtgtaattgcgccgctgcactccagcctgagagacagagtgagactctcagtgtgtctcaatgaatgaaagaatgacgtgtatactgtcgcaaacaagactatccatttttttcatatctaaggaaaaaacacttatcaaaaacaacataaacttattttttcaggtgaagaatatgtaaagagcctaactgctaaccccgaactcatagatcgtcttgcttgtttgtctgaagaaggggtatgtttttgttttgtttttgaaaagtaaaaatattaaaatagccactttggaatattaggcatatagttaccaaatttaaaaattggaatgtcrgtgggtaagctggatttggaatagttgtgttataaacaggagtggatgtcataggcttattgaaatgccattcctaaaggagttaactttctaaaatagatatattcccattaacctgagtagggcctggtacctggtagcactgtttggttgaggaaaaaatgaacggagtccatggctgatttgtgaataaagagtagctgctgacaaatgaagtggcaggcactgcagacagaggaaagaagagggaggggagtgtccagatagtaaagacctagaacttattctgtaggttagtaatttttcaattgatttataaagatctccctgaagggctgctatgaagaggaaaggattctgagatcccttccttatatgtcaggcyaagaaaaagtaatggtatatgaatgtggattggtggagcaggagagaatgattggaaatggtatttgtttgtaagaccactctcatgtcagtgtgtaacattaagcattttatccaggaaagattagaggcagagaggtgagtaaaggagtcattacaatagctgatgtgagaaggagtgctaagggaataattaaattctgagcattcattttcttatatataaatatataatgtttagcaataataacttcatagtgttgttataaggatcaaataagatgataactgtagcattaatacaattttcatcctagtgcctggcacataggtatggtaaatataaatggtagcccttgttatagaaataggttttaagtgataggacattatacataaatccagtctttacacttctgtcatcccttcttacctttatgatactttatgaaaccaaaaggaaatgagaagataaaagttgggtttgatttttgaaatacagatttagtattgccctaatatgtagccacttagttatatatgactatttaaatttaatatgtattaaaaattcagtttcttggtggtactatctgtctttcaagtgcccaagagaaacttgtgtctagtggctaccatattagagatcgcaaaatgaatacttccttcatcatagaaagctgtttttgttagcactggcctataagaaacactgctatcttctctcctattcagagttgtgtatatcataatgtagatttcaaaaattctctgatattaataatagttgtgtattgagtgaacagaagacttattagcggcatcttttggtttgcttctttcatagaatgaaatagaaagtggaaaaataatattttcagagcatcttcccttaagtaagctacagcaaggcataaaatctggtacataccttcaaggaacatttagagctagcagggaaaattacttggaagctacagtatggattcatggcgacartgaagaaaataaagaggcaagtatataaataaattccttatacactaaaataaagatgatattttatatattatgaacacttaatggtaaatactatttgtgtaacatatgaggcttcacatactttaaagcaaatagtaacttttttctttttttttttgcagtgctcacaatttgtcaggtagttttttaaatctttgcgcatggcatttcatttaatattcaacccaacctataaaaactaggtagtgtactcttatttgaccaatcaggacttgagatttagagagcataaataatttttccaaagtctcttgttaccagtgtaagttatgatggagccatgaacacagcctgtgttttctgacttacattttttctacctggtattgagaaattaaagttgtggaattagggacacaatagagaaagaaaatctataaaggagaaatagagattccatagagatattcagagtgtatgtaaatatctgttagatgatcttccctttattatattgccattaaaaataatttgggcacgtgccctctgttgttttaaacagataatcttacagggacttaaacatttaaacagagctgttcacgaagatattgtggctgtggagcttctccccaagagtcagtgggtagcaccatcttctgtggttttacatgatgaaggtcaaaatgaagaagatgtggagaaagaagaagagasagaacgaatggtatgaatctaagcaggatttttttttgtctgtgtagctttgtattattaatatgtcagctttggaaaacaagtttcattgctttcagatttattgcataaaatcatagttctgtatatttaaygcatgtcatacacatggtttttttctcttctatgtagttttcttttattgtcttaatttgctcaaataaatgggtttaaatgcaaacagactgttagtatgagttaatacaagtatgaaactgaaaatctgtgacagtcaagtatattattagacttagtgagatttaagtaaatatgtgtttaacattttctgaaatgctttaagtaatgttttaggaaatgttttagaaaatgctttaggtaaaattcccttaacataatagacgtaattctgggccattatatttgggcaacttatctgataccatatttattatgaagagaatactttcagttatttcttatgatatgcgctaagtctacttgatatggcctatttctgtattttataattacaatattataaatagttggaatgcatgtaacagttttttattcttctttttccatcatttatattcattgctctggagtctcactataaaattatccatggagagtccaggcctttggatagtgttaagaggtgaaataccataggaacttttgtaatttctaatagcagaccctctttatttgggtttttattttttataaggaagaacctttagaattaataaataaaggtccaaagggaactagtcaccataccacatagctaatttgtacaaactagtactaaaaccctaatctaattcccagacctgtgtgtgtattttagtcagtaaatcctcatgttaatcctgaaaagtgttgagttctaacatacgtattcagttatatttatttatttgtttttgctttttgattgttttgtagtactttattatcaagagagaatgtctgtggtttggtttggcatgcatgttcttgtctagaatgttgaaacatcaacattctgtagtcttatgtcataatttactgcctgaatggattagtatccatgtatgcattttgattttgaaaggaaattgcctgataatacttagaggaatataactgaacattttaatttttatatctcagcttaagactgctgtaagcgagaaaatgttgaagcctacaggtagagttgtaggaataataaaaaggaattggagaccatattgtggcatgctttccaagtctgacattaaggaggtgagtaaagagcatttactatgtaataaaaaaatgataaacatttaatagaacttatagcctttcttttgcctccatcctcagattttttttgtgtaaaatctttattcctaatttttgctagtcaagaagacatctctttacacctgctgataagagaatccctcgaattcgcatagaaaccagacaggcttccacattagaaggacggagaattattgttgctattgatggttggcccagaaattccagatatccaaatgtaagcttaaagtattaattttatgtggggatgtttaattaaaattttgtgaatagtatttctgcttttaataaaaacaatctacttttatgtagaatttgtactgaaatttagagatatttcacaaagtgacctggtaagtagcatgtctactttgaaaattaattttatgaaattccagtgtaaatcatttggttacttttatgtaaatttcttctttttgagagagagtctcaccctgttgccccggctggagtgcagttctgtgatttcggcccactgcaccctcagcctcccaggttcaagcgattcttgtgtctcagcctcccgattagctgggactacaggcgtgcactaccgtgcccagctaatttttagtagacatagggtttcgctgtgttggccaggctggtcttgaactggcctcaagtgatccacccacctcagcctcccaaaatgctgagattacaggcatgagccaatgtgcctggcctcttttatgtaagtttttaaacctataagttttattgatcatgactatgaaaagtgagttctatatagattctaatcaacaaattttgaaaagattatattggaagcacattttaaacttgaacattaataagaaatagatgctttagaatgtaagagctggacccttacaaagtttccatcataaatcagttgagaagtcttgtctaatttactaaagggtcatttttcagaaatcgttatgggaatatttaggaatactgagaagatatgtaaatgctgaagaatttaatatgataagatgtaaatttgctataaaataggcgtttctaataatgcctcttggtttcagggacactttgtgagaaatttaggtgatgttggagagaaagagactgaaacagaagttttgttacttgaacacratgttccccatcagcctttttcacaggctgttcttagttttctgccaaagatgccctggagcattactgaaaaggtaagttgaaagtaatttgtagtgactttataaattattatatcctgcctagttttgtttratttctatatgtgtttttaaatatgtagacaccacgggccctcttttcctgcattttgttgggtatagcattcttaggaattatagaagaagtcatttgcttcttcattgaagggtaagtttttctatgtggcagacactttcatatgttaaatgtttcaaagggaaggaaaccattagttacaaatcatacgtggtgtctctctgctccagtgcaggaaaaagaaatgtggttgtcatcaagaaaatacagctaaattgtttttgyatacatattactgatttcacaagagctattaatatgttgtagttgtgctttggaaataatttatttgtttatcatttcatgtcttctaggacatgaaaaaccgagaagacctgaggcatctgtgtatttgtagtgtagacccaccaggatgtactgatatagacgatgctctacattgtcgagaactcgaaaatggaaatttggaggtattcatatgtaatagtgttcttacctaaatatagttctgttctgagttcattttcttttgaactagaatagaatttgcttgttaattactcttgtgaagtataattgtagctgcacgctattggccatatgtcagaagttgaaatggtagaggtgactgagtcttttttaaatttagctaaactttatcktattaaaactscattaggtacatttacccagtcaagcatattgacatccttttatttttatctttttaaggttggtgttcatattgctgatgtgagccattttattaggccaggaaatgccktggatcaagaatcagccagaagaggaacaactgtgtatctttgtgaaaaggtaaatgtattgaatttaaaaatttaacagtcatggacacttaaggattcttaaacggccatgaattagctaagaaaaatacatggaataatgtggctttaaatcactaaatatattgcaaatttttgttatcgagtggttcaaataacaagtaaagtattgtgaaagtcaaggggaagattaaacttagtctattagtgatttattgtcagagttcttctgtatacttttttccataaaaatttagtttctcttttctttttttagtattttaaaaacaccttgtagtttatattaagcattggagaaaggtccagtcatagagtgtgtcaggtatcaagtataaacttatacagaccagagatttaaaactttcagaggacagctaggtcgttagtgtagagggcttaaacttagattaattggcatgaagtccagttttccttcatagctttccttctttaacaattttgtataagtgcttttataraaacaaaccttttatttgaccttttctyaattctcctatttacaaaawgcagaacactcttttctttccttgtttaattaatgttatttgagaatagaacctcacataaatgtatggttatggctaagtaatctgtggttctrtttttatcttttgcagaggattgacatggttccagagttgcttagctctaacttgtgttccttaaaatgtgacgtggacaggtatttctgcatggttttttttccttgaagacattgtatttactactttaacctgattcccattaacaaatactctgtattttccttcacaggctggcattttcatgtatttgggaaatgaatcacaatgctgaaatcttaaaaacgaagtttaccaaaagtgttattaattcaaaggttcgtttcatggctattaatctctaatttttaaactttttggtacttttttgaaaaaagctaaataaattttttaaagattcacrtgtacgtatatatacacatatataaaaatatttatatatttgaaaagagatgttatgtataattatatgtatatttacttaacctaaaatagaaaaaacatatacatrtaagtacctgagatataaacatagtctaaaaaagtccccagctgcgggcacgtgcttaaacatgtacagatgcacttaaatttacactaaaactcatttggcccttttgctacctactctcagagaagaatgcagaacaggccaccagagtcttattgccagctttcttgacccagctagtaccaagccaaagtaaccagccccagccctactgccatcacctaaatttgagattcctgcccacttcttgagaatttttcagtcaagctagatgctcttttgaacatgtaaagtggatacagacaaatgtatttcagtttgggtgggaggggaagagtctttctaggcagaaaaacaagggctaggtctgtgccctcaggatagaatgggggcactgttatagcaaaattttgagggttttttttttccaattataagcagataatttttgatgtgattcagaaattagttcatgttgcagttgtcctgtattcagaaacttacaaagaatatatacttgaaaagaccaactagtggttttatgccctaactcaagaaccctagtaattgaagctgttcctacttataaatggttagtgttttaaaagtcagcaggtacaccacttctttcttcacattttctcacagaaatgatgtttaagtcaccattggattttagtagaactagcctgagatcatgtttattcataatggagccaggttatctttcttgtccttttcctgtttctttgtacttctcccaaaaatcccttatgttctctcttattttgccctacatctttcttcaagatttgccaaaccccttatcttctaatgatctgttttccaagcttaacctgttttttctggccctttggcatccttcttgctgttctgctaaccagtggttgcaaagaaaacagtgttagactggtaaataatgatgtgtgaattatttaagccatcacagtttgtactttaaaataagaatgacttttaattctttaagacttggtcagtataacaaaattatatgaaaacaaacctagtgaatatataacataaaacctttttcagaggggaaactcttagcctttagtagatgagttggctctcccaggaatccgacctgacctgcgttatctaactctgttatgctctttcttattttcacttgtgaagctactccttagacaaacaaaaaaaaaaaaaaggaaaaaaaatgatggatttctctgagagaaataggaacagaagtagttatttgtatattttggttatttttcattggggattactttaactcttttctactatcatttgtctggtttttacatgcttaattttgggtatttactggatttcctgcaaaacatggtgtctcgactcctgcagtcttaattatttgcaggggaataatgatcatctggaaaggatttcatatttgttatcagagaaggaatcgatctaacctacctttgtgttttattttagcattatctgggtatttatacagtaattggaatatacaagtaaagtttaaagtttatttgctaacaacattgccattttaccttttaaaatatgtttgtttatgttgtataatgcctcagataagaattaatgaaccagaaatcatagatgtgaagtataatatcatagctaagaatttctattttgttactgattttaggttttctgaaatcatggattttatgtagtgaaagtaggaggacatattgaaaaccatttttctatcatttataagaattatataacatacattttcttttttaggcatctctgacrtatgctgaagctcagttgagaattgattcagcaaacatgaatgatgatattaccactagtctccgtggactgaataaactagccaaaattctgaagaaaagaaggattgaaaaagggtatattttgtttttcatagtattaagataatttttatactctttacattgtttgatcataggcaatgatgaattatttaaaagggtgaatagagactcctgtttcttctagcttccatttatgtatgtatgtatgtatttgaaacggagttttactctgtcacccacgctggagtgcaatggcacaatctcrgctgactgtaacctctgcctcccraattcgaacaattctcctgtcgttcaagtagctgggattacaggtgcccaccaccacgcccagctaatttttgtatttttagtagatatggagtttcaccttgttggccaggctggtcttgaactcctgacctcaggtgatccagccgcctcggcctcccaaagtgttgggattacargtgtgagccaccatgcccagcctctagcttccttttaaatgttagcaacttgattctggactgatgtttgttcaggagttccatccttgtaatttgttgtgttaaaaaattgtgtttgagttaaagatcttgaagaaattccaggaaggcaagaacaccctaagatttctggaaattgtttctaattttaattagaaatgagtttccagattggacattaggtttcagaggtttaaataaacgtagattaggtcctccttgcactttaaattttggagattatttaattcaacctcctcattttttaggcaattaaaagttgcataaaaggagtcttcccaaagatctgactagtaacagatctgagtcttttagctgttatgtcatggcttttgcctaactacaaaaggcgtaaggtatagagtattaactcaggcatgttgaaggaaaccagttaagagaaatttgactcttaaaagacgttgttgactatcagaggaaaccaagtacatgaaccttccagatgttggtctcagagttcccaagcccctctaggatagggtcacaagcagttactaaaggtgtggtgagtgcggattgtacatttgtgtcatttcataagatgcgcctatttaaattcattaaaattaataaaattaacaacttagttcctcagccttactagccatatttcaagtgctcaatagccacatgtgactaatgactatcacattggacagggcacacatagaacatttccatcactgcagaacgttctgttggacagtgtttgaggtagttatgtacctatgtctactaacacctcagttttcagggaattttttatgtgatcttaaatatgaaacttgaaacagaaaggatcatttgggcatgctaaaacccagtggatactattaaacttgagcaaaactttcactcaagcttgtcacttgtatataagaagaagataattgaatttttttgtgtgacacaaaacaccacaaagttttttttttaagcaatgtaaataaaatgcaaattgaagctgtatttattttaatagttttaaagtaagaattcgcatttgtaacatagctttttaaaactgaggatattttttaatttcagcagtctgtatttttaatttggtaagtagatggttgcctcctgggaaaacatcattgaatcattttagtcttagggagaattgaaaaagcaatcagaaaaaaaaaccgtcttttgccttctaaagtattaatactcatgggtagacataacattttaggtgttctatgaggaaaaatgatcaaaatgtgrtaagtataccttgctttttatgtcaaaatccattaataaatacatatcagacctgaagtagagccttgttttaagtgcacactacaaggcaagaaaggaatatttttgagattctctttttagtatgtgttcctactatagttcttttaataaaggtgaggaattgaagaagacaaggacttagacttagtgtttcttttaacttgctccatcttattttaatttttctcttccccttcttttccttctccatgattgttcaaggttgcccagtctcattaaaatttttagttttaggttgatttggagctgacctcatgaaagttatgtcaaggtgtaagaaacattagacttgccttgccttgtgggaatttactttccaaaggggaacttgccagctcattaaatgaaccatgtgtgtaaagtcctgagcatggattgtttatctgacacttagcaatcaaatattaatagccatcactacttgtaacctattagtgatactaggttatcagttgcttctcttttggttcagtctttgtggaagatacttttgaactgtggatcttctggtgttactaagctacccacagcagcttccccttttgcccctctttattgtcccctgccccaataactgttttctgtagtaaattaaatacaatcaatccccttctttatttgtaaaagtgattaaaaacctgtgtagctcaataaaaactcatcgtttgggtacagaagatataaccctcagaagcacagggattcagatttccttgtgttgctatcgtcctctcttgttaaatgcattttaaatctactgagctgttcatgaaagctctactgagctgtttatgaaaatagaacatgaaacagcagatggtcataaagccttcagaagagcaactattacacacttgctgtagtcattgtcttttttaaaagaataatttctatacttttgtcttttattggcttgcttgactataatttttctctttaatttttatgtagggctttgactctatcctctyctgaagttcgattccacatggacagtgaaactcacgatcctatagatctgcagaccaaggaacttaggtttgtaatttttttgatgggcattagataagatttttttattttaattgtcatgtctactgtaagtacaaataatgaaaacgtttatatacaaaataatgattagggtcatgatttctactttatttggcttgcaaaggacagaaaagtaaatttaagctcagtttttcttctataaaactgcgtttagtcgcataatagaaaaactttcaatttgaatttgtttgctttgatgtgtgatgtattagaacttgactagtaatagttagagtaagataaaaaaaattaccccaattaatttctaaagtagaatatactgtagtgcaggggttcccagcccctgggctgtgagctttactacctgagctctgccttctgtcagatcggtggcagcattagattcccattggagcgccagtcctattgtgaactgtgtgtaggagggatctaagttgtgcacttcttatgataatctaatgcctgatgaaaccatccctccctccccttgtcgcatagaagagttgttttccatgaaacccgtccctggtgccagaaagatgggggtaggatagaataatagatagtaggatagatagtagggtagaataatggtgaagatcatgggttatgaagccagactccctaggtttggatccctctgctgttattactattatatttcccactaaagtagttatttgacttctccatgcctcaatttatttgtctgtaaattgcctatgattgataatggcacctacctcatagggtgctgtgagggtgatattagctattgttgtttattgatttagttaagatgtaggaaacaagaatttttttgttaaatcagggtttaggcctctttccctgcctcttayttacattaaggtaattttggaattcaacatgcatatgcacttttctaatagatgaccaagggttaaaaatgggaatatactcaaattttttacttagagtaaatatgtgcttgcgtgctattataatatctaacaatcccttatagtagaacttctgtgtaagtatgtttaatattaatgctaataatgagcccagtactaagagcttttatgagcaacaggttgacactagctttgccaaagtaaaatatcagccatttcttcttaccaagaagaagaaagaacacatttctgagatgtccccatgtgattggaggtctttctaatatttttaaaatgaatatactttagaaatattgtcaagaagttacaagatgaaacttgaatggaaggttaataatatgtgttcattgacttgcaagacagaaagcactgtatcaacagaaggtggatcatttactaaactaaccgaaaaatgtatgtgaataactatatagagaatcacagcagtatcagattggttaagagttttgaagtcagattgtgtggactcaaattctcatactgctagtaactctcaccttgagcaagagaataatgaatatatcctcaattttctcatctgtaaaacagagtttgtgggtgtgtgtgttgagggcaggatgtacttatagcacaatgactgacccattgtaagtatccaaattagctattataaatatggtctcttcatttgagtaatttattgttaaaaattttggtttttaagccaaaatttgtatgatctaaatagcttttagttcttgtaaactttattgatttacaattaaataaaaatatttttggacctggtaaaatcaagtaaaaatgcttgttttcatttcatttataaatagagtagtaaagcttctgtttttgagtgcaattttgttgttgttttttgacacagagtcttkctctgtcacccagcctggagtgcagtgatgcgatctcggctcactgcaacctccacctcccgggttcaagtgattctcatgcctcagcctctcaagtagctgggactacaggagtgtgccaccagacctggctaatttttttatatttttagtagagtcagggtttcgtcatgttggccagactggtcctcgaactcctgggctcaaatgatttgcctgcctcggcctcccaaagtgctgggattacaggtgtgagccactgcaactggctgagtgcaatttgtaaagtttcctctagcatgtaagatttactcatgcagtagttgcataataagagattgttagcggagtaactgagagatgaaagaatcataagttatttaaaatacaaatgtacacacacatatgaatgtttacataggaaatgctcttattatcttcttggtaacaaaggtaacctgtgaaaaaatatgatatatagaagtctcagattctcttttttgtttgtttaatgctttttccattggcagggaaacaaattccatggttgaagaatttatgttacttgccaatatttctgttgcaaaaaaaattcatgaggaattttctgaacatgctctgcttcgaaaacatcctgctccacctccatcaaattatgaaattcttgttaaggcagccaggtcaagggtaaggtcctacagtttgaaaaatcatctatttgtgttttgatctacctgttgttctaaataatttatattcatatttccataaaggttttattgtttgttaatacaagaatatgccaatagttcttttttcttttggttttttttttgagacagggtctcactgtcacccagactggagtgcagtggcacgatctcggctcactgcaccctccacctcccacccagtctcaagccatcctcccgcctcagcctcctgaggagctgggactgcaggcgcacaccaccatgagtggctaattttttgtatttttttggtagaggtagattttcactatgttgcccaggctggtctcaaactcctggactcaagtaattatctcatctcggcctcccaaagtgctgtgctgggattacaggtgtgagccaccgcacccagcctaatgtttttaaagagcaccctatgctaaagctggatgtttagactaagatctatgcagcatcctggtcatataaaactcttccatgtttccttgtctttatgcatgtttcatatgtctatgttgcttcatggctcctgtcaactgcctgactttacaaataatgtattttttttttttwtttatttacttcaactcagttaaatcctttccatttcttgttcgtaagaaaagtatatttattgcatacatggaaaagaggaaactatagaaagggcacattttttcagccctgtatacccactacttcttgttagtagattttcatttaggggtgcttaccccttgggtgactatggcctacattgcttttccttggattacctggttaggccctatccttcccatctagaagagagctgggagcagtaatgttggactgcagggcattattcgatcatgatggcattggtttctgattttggatcagacctttacggcatgcatgcccagcttctccagattcataggaattgaatcagcttctcactcctctgctccaagccttaatctgtaaatagggattttttccttcattgtcttatttcttccaaagacctaagagaagagatgtatatttgactcatctccctagggtagaacaaagcagctaaatttgatgaatccgaacattgttctgacagaactgtagtgaccagtacagttttgtttctggctactacttctactttgaagggaaggaaaataacaaaaacatgatgtttgttcagtcagatcagttatattttgaagacataatggtactgacttagaaatgtttaatatggtgctcttccctcctttttgtttacagaatttggaaattaagactgatacagccaagtctttggctgagtctttggatcaggccgaatctcctacttttccatatctaaacactctgttgagaatattagccactcgctgtatgatgcaagctgtgtacttctgttctggaatggataatgattttcatcactatggcttagcgtctccaatatacacacattttacttcacccattagaaggtattttttccttatgaaattaaaggagatagaaaatggttaattttgaattttaaaagcacatattagtactgacataccatggttcttatttttccatctatctagatacgcagatgtcattgttcatcggcttttggctgtggctattggggctgactgtacttatccagagttgacagacaaacacaagcttgcagatatatgtaaaaatctaaatttccggcacaaaatggctcaatatgcccaacgtgcatcagtggcttttcatacccaggtatttgccttttgtcgatactgctagaaaaaatgaagttttgttcatttttaatttaatttcaattttttgtttatttaaaaatttttaagacaatttaaataagttgtatgttattttacagttattcttcaaaagcaaaggartagtaagtgaagaagcctatattttatttgtaagaaagaatgccattgtggtattaattccaaagtatggtttagaagggacagtcttttttgaagaaaaggacaaaccaaacccacagcttatttatgatgatgaggtacggtatttctcatgtttgttttcttttcyggggggcactttttctttgagagttcataaatggtacctataaagcataaaattattttttgtaccctgaagaatttatcctgatmtccaaatacatgccagaaaatctacatttaattttgccaactaaactatggttttactcacaatttctcaccactatatgtcttctcatatgcaattgttgtctttgatttctttcttttataccatgtaaagttttgccctacatggaacaataaatgactctttataactcggggaaggaactttttttttaaacttacttctagtgtttcttatttgacacacatactccctattctccttaggagaaccacagccctgagagaatatttgaacaataaactggccaaaatacctttgtgttcctctactagactaaaaatttcctatttattagtggggtgattaattaatcaccaagaatttaatgaacatatatattagaaataccttaatgaaggagaaagtaagcacataagtaggtcatatttatatgagactactaggtttgtggcctttgttatgttgaacacgtagatgcttactaatttttatatttaaacttctactatgtaagataaattgtaaagrattagaacaaagcctcaaatgtaaggaagcaattaagaatgataaaatgtgttttgtttagataccctcacttaaaatagaagatacagtgttccatgtatttgataaagttaaagtgaaaatcatgttagactcatctaatcttcaacatcagaagatccgaatgtccctggtagaaccacaggtaaggccaaacttaaaatttccttgttgtgatggaacaaacagtacatattttgtcaaagaagggacgtagttatttctgtttaatgttagagggaaccctgtaagtagtgtagaaaccaaatatttgcatagcaaatcctgttttctcactgatttctttaggccacgggattctagacatctgagattctgttcaggtctttggtgctaaaataaaaaggtcttccattctcctgcctagtcttttctatctagaagttttgaactctgcattttgaagatgaagtgtaggtgtttcacctaagatactggttcttaacttttgtccttccccaacacacttgaaatcaactctgattctgtcaatcacagtggctccccattgggaaggctgttttgtagttaaaaagaacacttcctaaatgacatgcttctcacctgttgagaccatgtctagcttttacatttttgaaccactgctactttgtaaaataccttctgtgtataaaacctttaattagccccctttcccctccctaccactacatccttttaaatttgaagctggcagtggggaaggggaggatgaggttgagatgtattctatcctttaaatcaccttatttccccccatttgcattactttagataccaggaataagcattcctactgatacttcaaacatggaccttaatggaccaaagaaaaagaagatgaagcttggaaaatagctatattcaacaaaaatcttcaaagactggtttcttttttaaaagaaaaaacttgaaagaacacttctaagcctragtgtgtgatacagtttgttacttttaagtacattttaataatttcagacatctgcatttttattgaacagttgactgtatctgacccatcatactactatacttstgggttgaacagaattatttatgcagaataattcaattgaatatccatcacttaaatacagtgacaggacagcaacttcagggatctgtaaagatcatttaaatggagtgctcatctcattgaggagcagattaattttgcgtaagtactttgattatttaatatttgtaagaaaaaactttcattttcctacagaggaaaatagaacaattttagaagcaaggaacaatctcttttctaagtcttggaagctgtcagtgttgaggatgtaatctcctttgccatctttaattcacctaacttacactaggtgttctcttactgtctttaaaagcttcctgtattttattagtggtccttgaaaaactgtgaatgtttgggawttggtagaaaggcaaaaagtaggatattttgacctgactggaaagatggttgtgtttttattgccaggtaataagtgtgatcattgttgaacttcagctccagtgtctctccagaataagacattggcattcaaatgtctatatcttgttacttacaaaataaaaaacagattaattagtggcttttaaattgtagttatatcagtgtatatacacgaggggaactgtataaagacatactaaagggaacagattaaaataagtattattaataaaatttggtgtgccagactgactacttcccttgctaatcacagagattagtaatgattaaattaatatcttcaggaatattttgggatagggttgccttaaaacattttacttggcttattcaatttctaaagcacttacgttgtgccaggttccactcaagtaaaytatctctgccttcaaggagcttgcagtatagtgagaaaagcctgccaagtaaatcagcaggtatactaaataggtagtcatttaggcactcaataaatgttgactaatttttccagtttcctattactgaggaaaacctccatacactgaggcagaaacttgtgtcagttggaggaaaatagacttgagtagtctttggtccaggtaaaatgggtcagtgacactgaaacagtagagtaggagtcaaaaaaccttttctgtgaagtgctagaacattttagactttgttggctatggtctgtattgcaactatagtacacaactctgccgttgatagtgtgtaaggagccatatacaatatgtaaacaaatcaacatgactgtgtttcaacaaggcctgatttgttaagtttcatatatagtcatatgtcacttaatgacagggatatgttctgagacatgtcacttggcaatttcatcattgtgtgaaaatcatgatgtagttacacaaacctagatggtataccctatggtatcctatatgggatagcctattgctcctaacctacaaacctgtatggcatattactgtactgattactgtaggcagttgtaacacagtgctaagtatttgtgtatctaaacatatctaaacatagmaaaggtacagtaaaaatatatatatagatatatataagatataaaatggtacacctatttaggacatttaccatgaacaagttggcaggactggaagctggctctgggtgagtcagtaagtggttagtgaatgtgaaggccatgatattactgtgcactactgtagacttttataaacactatatacttaggctacataaagtaatttcactatgatgttaccatggctgtgtccccaggcaataggaatttttcagctccattgtaatcttacgggatcatcatcgtatatttggccattgttgaccaaaagttatgcagcacrtcattataattttgatgtgtcacaaaacattactcatttgatttcccccacccccgccaaccatttaaaaaagtttgccggctaggtgcggtggctcatgcctgtaatcctagcattttgggaggacgaggcgggtggatcactcgatgtcaggagtttgagaccagcctggccaacatggtaaaacgccgtctctactaaaaatacaaaaacttagctgggtgtaacggcggatgcctgtaatcccagctacttgggaggctgaggcaggagaatcgcttgaacctgggaggcggaagttgcagtgagccgagattgcaccactgcagttcagcctggatgatgagagtgagactccatcgcaaaaaaaaaaaaaaaaaaagaaaagaaaattagccaggtgtggtggcaagtgcctttaatcccacctcaggaggctgaggcaggagaatcgcttgaacctgggaggcagaggttgcagtgagccaagatcgcgccactgcactccagcctgggtgacagaacaagactgtctcaaaaaaaaaaaaaaagaagaaaaactgcctacaggccatagttaacctgcaatagagaagaaagggaagtagggcagtgcatgactggccttaggttttttctttccaagtttattttcttgtgcttcagctactagaaaggtttaattcagggataagtcccaattgagtagttcaagatgatcagagactttgctattttcccctaagttctattccataatctaaaatgttctgtttctagtgccagttcttatgctaagcaggttacgtggaatatatcacttaactcaaaaagccctgttaagccaggactgttatctccatttaacagatgagaaaatggaggtttatggtctgttctcacactgctacgaagaaataccccaaactgggtaattattataaaggaaagaggtttaatggactcagttccgcattgctggtgaggcctcaggacacttatacaatcatggcagaaaaaggagaagcaggcacctttttcacagggcggcaggatgaaaatgactgccagcagtggaaatgccagacgcttataaaaccttcagatctcatgagaccggctcactatcacaggaacagcatggaggaaaccgcccccatgatccagttacctccacctggtcccacccttgacacgtggggattgctacaattcaaggttagatttgggtgaggacacagagccataccatatcagcccagatcaagtagtgacagagtagggatttgaatacaggttatagtcactattgtgttatttcttgacttttgtactattaaaaaactgtagccagtgaggcttctacccttagtacccagaactccttttaggtatagcaattgtttttaggtaaatttatattgagtttaacacctgtgtgattaaagacaactttccaatgtagtatctgtagccatgtcccctaatggctattagtgttcatggttagtgtgttgaagatgagccaggtacataacgcggcacattttctgcaggtcagcagtaaggtttcaaggtacagttatggaggaaagaagaaaatgacacattgataacacaggtctttattcccttttgaatgagacagtttttaaaagttgatttataaatacaaaaatacattctccaaagatagtatttccaaactgttatatacccatctactcccaacatggatataagttttttaaaaaaatagttgtatataacatacatatctgccccagtgttacttcacaggcctatgccctacgggaactccactctcccagccccactttttctcttggttctcccacattcttattctcccacatccctacccacgtttgagctggaaaggatgtccctaccctaggcatgaggtatattttattctgggcaccacacatttgccccatagataacaatacacgtgatgatgtcactagtactacctttctagtatttacatacttaaaagtagtaactagaacagttatcactggaactaagaattttccccacagaggtgaacagaccaagaactaaaatttcaggaaacctgtttaatttcttttgtatctttgaaaagttagttttatatctaagatttcttcacataggttataattcatctgtatgttcaagcttttatgtaaaaatatatagtgccttcagttttaacatagtttcacatgttctcagaactgctaaattcagtgctaccagtaaggcttaataagtagttcattgaccctgtaagataggagcactcagctctgtcacaatttgttgttaaacacatcactcaatgtaagtataaaaatatttattgataaaaaataaacttataattcagcaacttgaagttccaggagcatttctgttgttcctatgtcagtaagcccttgatttttcacattaaggagggaaagctaagcatgttacttgaagtaattttttcccagtcaccatcatgttgatcctgtgcacaacgatatatgcgaggaactcttaagcttagtctttgattctgacagaggyattctatggactgctgcattgaaaagggcttgctgttttcatccaacacctctgtgttgtgtggtcttgctgtgaaaaagaagacaataccttgttttcagtttaagtaggaccactggaggatgcaattatcgggactgtttttaaaacctaaaagcacgtttctttagctgaactctgaagggacagtaaagatacagtattttataaatcaatattctgcatcaaaaagcatcccaacactttgagaggccaaggtgggaggatcgcacgagcccaggagtttgggactagccctggcaacatagtgagaccctgtctctaccaaaaattttaaaaagctgggtgtggtggcacatgcctgtagccctagctactcaggaggctgaggtggtaagactgcttgagtctgggaggtgaaggctacagtgagctgtggtcgtgccactacactctagcctgggtgacagaatgagaccttgtctcaaaaaaaataaaataataaaatttaaaaaaatccttcatttatctctacttatgtttagatagacaactgcatcctgaaataggatggattttgttcaggttaatattagaagagacctgctctgatactacatacaacagaaaggcagtttgctcctactacatacaacagaaaggaaaactaaggtggcctccctattaaacatttgttgcacatttgctgatatttatagtattttataagaaactggcatataacagcagggcaaggtggttcacacctgtagttctagctactcaggagggtgaggcaggaggattgcttgagcccagcagttaaaggctgtagtgatctgattctacgactgcactccagcccgggtgacagagtaagaccctgtctcaaaaaaaaaaaaaaagaaaaaaaagaaacggcatacaaggctgggcatgttggctcatgcctgtaatcgcgcagcactttgcgaggctgaggcagaaagactgcttgacaccaggagtttgagaccagcctgggcaacacagcaggccctgtctctacaaaaaaataaaatgcaaaaaaaattggcacataaaattaaagactgtcctgactagtgcctgaaattatgatgagtttcttcaagtatgaatatataaccaccacctggaaggttcagtaaatgccctcatcaaatacacgctacctttgcacactttgtagtatgtaagatacttgtgtattcagagtaaccaaaatatttaaaggttattggatgttaagaaaacaggcttaccttttagtgttttaaatttcatatagtttctcaatagtactattgtctaataatcaaaattattttatatttctaatctaaacaatattaagctttcactatattttctccgtaccttcatattaaatgcttgagatttactctcaacttcacatgtttgtgcatcactttctttgcagtaactttctgccccaactgtatccataatattgcttccacaattctgcgtattatagccactatccatctgacaggagaaaaaagaaaaaaatatattgtgaggaacttaaaagtcaaatatttaaataagtaaaccactataaactctcattcactacatctgaatgatcctaacatgtaatattgatcatgttgaacaaaattcaaaagtaatgcacaaatataaaaggtagtcctgcatagtactgattattgtagtcattttacaattccttccaatgaaatatatcttgtaacttccttaagaatcagtgaacagcctactgacacaatgctttcctgttattttgtgatcgtacctagtagacaaaaatgagtattacaactaacttcaccttccaacgcattttccaggcttgtctctaaatggcttgaggcatgctgcctttaaaaaagtggattatattatatttacacctagttgttcacaataatgccacatatataatggctctagatgttagttcagcttttcatgttaataaaaattgtagcatcctaagatacactgtttcagtgcaaaagagcaaaaaagaaagattctagcgaacttccagcttggaaacatttattgagtgtctaaaaaggccaggcactatctctatatatttaatatttttttctcctttcaacaaccctaatactttactagagaaggaaattaaggcttaaaaagcttaactttcacaatgtcatccagtgatgaggtgatgaagatgtgagacctaagtccaggttctgttcactgcacaacgctccatttacctgtataatgctgagcaccaaagaaagcaatccacaagggaatcattttgcatttaagccctccctgcaagttaggatcagagggaaggaaaaagctgactgtcattttgtttccctcacaaaggtacagactagcctagaaacggcactctttatcacttaataatcctgaaaaaatgttcccagatttcaaggctggatacatatctgcttactactagaggtcatgttccaattagaacaaaagccttgtgatgtgtaacatttttggggaaaagccttgttctgctatcattcaatagctacttgatcaaaaatataaatgtcagattgctcccagagattctgccaatagctcttccttctaatattcatcactgccaaatagctggcttataatgcaatactaatatgtaactggatatatatggagggaagagttactcattagtacagcaggaagtaaggcatgcggggagtttgtcccacactatgggaagagcaggattgatgagagccaagttgagatggtggctgacttcactgtctctcatctagacttctgctaatgtcaatgcctaatatgtaccaaccaggcaacagataccttgttatcccccacaggcatcaaggcaggcatcaatctcactttatagctaagaaggatgaggggacaaaaattaaaaagtcatgttctattcactgctatgtaaatcttgccttaagatcccacagcctggaaataaaagaactctaattcaaacttggttctaattgcaaactttatattccagttgggtcatggtgcctttaaatggtgtctctatgtcagtcatttaacatgcactttgttactaaatttatttttctaccacataaatcagatgtcattgtcttttaaaactttcaattggcaacagttgtgccctgtgataacattccttgacatctgggcccagcactttagcccttccctcatcattctcagtcccccttgtttgttaccattcaaaggaccttgccttccattactacttatgtttttgcttttattattattttaaactgacacacaattacacatatttatgatgtacatgatattttgatatgtttacaatatgtaatgatcaaattggggtaattagcatatccattaactcaaacatttatcattgcgttgggaactttcaaaatctgctcttcaagctatttgaaaatatacgataaattgttaattacactcaccgtatagagctatagaacactagaattactcctatcgagctgtacttttgtatccattaaccaacctctccctatccctgctccccctacccttcccatcctctactacctaccactattctatactcttctatgaaatcaacctttttagcttccacatgagggagtacatgtggtatttatctttctgtgcctggcttatttcacttaatgtcctccagttcatccatgttgctgcaaatgtaaggacttcattattttttatggctgaatagtattccattgtgtatatataccacattttctttatccattcatctattagtggacacttagggtgattccatattctggctattatgaatagtgcagcaataaacactggagtacaggtatctctttgacatactgatttcctttcctttggatatatacctactagtgggattgctggatcacatggtagttctatttttagttttttgaggaacttccataatagctgtactaattcatattcccaccaacagtgttcaggcactgtttacttatattaatcacaatgatcatgctaatatcctgtaatcctattattatccccatttaaagaagaggaaacaagctgaaagaaactgtcactttctgggatttataaagctaacagagctgggctataaactgaaatctgccattacggtttcccaagcccatgttctttaatgccatgctcgcgcctcaactaaatacatttgcacccacacccatcctggcaccctgccctcctttaaacatggaggagttactgcggctactcctatcagggttctagattctaccccctcttgcatgcctcagttccctcatttataaaacagatcaccatttgacagatgacgatatctattatatctgtaaggtattacagggattagcttctgactgtaaaatgcttggcatggtctctggtacttgaaaaggacatgtgactgatacctattaataattatattaataattatgctgcccaactcctagtttttaaaaatcttctctctcttcatttaaatgctgtatgctgtttcttctgtgttccattactggaacactaagcatgtgggagttacttataccctgttgttcaaggtcatcgccaaggtctgattgcaaaaattcaaaaaattgcaaccttaggcataaatgggttaagtaaaaacaaagtaaaaaagcaaactacaaaaagatctgactttgatgctcttctctaggtatcattttctttcccttcacaactaaactccagagttatctacacacgttatttcattacttcttctttaaccttccttccattcaccttgaggctgttcagttattaattacttttcttattagtccattagccccttttcaagcccaatgttgcttgctcctattttggcaatgctaaccattctttcctgcttaaaatgcttcatgacactgtgctttctaagtgtccctttctcctctttggctggttcttttcagtctccttcaggggctgtacttcctttacctgatccctctcaattcttcttcagagttccaaatcctggctccccgttactctcagtaaataccatccctctggttgaacttaacctacgtattcgttctgtttttgttacacaaatatttaatgagcggctattacgtgacgggttctttttaataagcactggggataaaaacatgcatgactgctgcattagtggtctgattggaaagaatgcaaaatgtgcatggaatcatgaaagcatataatgaggtctggcctggctaatgtgatctgggaaggcttgaggatgtaatcaataagttgtcaatgaaaaaaataaataggagttaactaagtaaaatgggatagaaatgctacatagcatgtgcaaaaaggccctgtaacaagagaaaacgtggctttttaaaactttggaaagctagtgggacctaaacagagaatgaaggaaacaagctggagagtagaaagaccagccttgccagccacattgcagacttttaaaattagtaccgaacgcatttcaaaagtgtagaaaataaaaaactcaatagaaaggttattatataaactggaggaaattgcccaaaaattcaaaaaaggagatttaaaaaaaaaaagatttttagaaattggagaatcaaaagttgctccagagagaacactagaagcagcagaggagaaatctaagatattattcaagaaaagatccaagaagtgaggggagtaagtttacagactgtaagggcattctgagtgaagagtataatggatggaaagaaacccgcattaaaggacatcactgaaatttcagaaccctgtagacaaagaaaaatgcctatccatgtccagggagttggggataaaaagagatcataaacaaaagattaagcactgaaatagcttcagatctctcactgaaatggaagcaatgccttcaaactctgaaggacatttctgaactctcaaatgtgagagacggacacatgatcacacatgcaatgtctttagaaatgtactcttcctcagaaagctagcagaaagctaaccatgtggcagaaatgtaatgtatgaaacatttttagtagacattatgatgttatggcccagagagtaaaactgagactgcttggggggtatcacataacatatttttacccaatagaaggaagaggttgtaatagtaagagaagttaaaaaatgaatggaatagccctgcaagtgtaattaagcatagatagtttgacaagttagtagtgactacaattatgggagaatatgctacccacggcttccaaaggttagttggattagatgatgattaaggtgtatttcaacaaaagtattttgtaattcctctatataaaaaagagagagagaagagagagagagag

SEQ ID NO: 95541 - DNA, 28860 bp, Homo sapiens
tacaggtgtgagccaccgcgcctggccattttctttcttagattgtaaactgaaggcttagatctaatgttcttggatgggcatggtggctcatgcttgtaatcccagcactttgggaggccgaggcaggcagatcagaagtttaaggttaggagttcaagaccagcctggccaagatggtgaaacctcatctttactaaaaatacaaaagttagccgggcgtggtggcacgtacctgttctcccaggtacctgggaggctgaggcaggagaactgctggaatccgggaggcagaggctgcagtgagccaaggtggcaccactgcatccaccctgggagacatagcgagactccggttaaaaaaaatatatatatatgtaccaattgttgtgtggataaatgttctcatttctctagggtggaatgctgggtcatatggtagctttgtgtaactttttgaggagctgccagactgtttcaaagtggatacaccattttacattcccacaggtagcatatgagagtttcaatttctccacatccttatcaatacttgtcattatctgtcttttttactacatcctagtggatgtgaagtagtatctcattgtggttttgatttgtgtttccccagtgactattgagattgagcatcttttcattgttttttggctttggatgacatctttggagaatgtctattcagatcttttgtccatttttaattgggttgtcttatcattgagttgtaagagtttttttttgtttgttttgttttgttttatttgagatggagtcttgctctgtcgcccaggctggagtgcagtggtgcgatctcagctcactgcaagctctgccttccgggttcacgccattctcctgcctcagcctcctgagtagctgggacttacaggcatccgccaccacacccggctaatgttttgtattttttagtagaggcggggtttcaccgtgttagccaggatggtctcgatctcctgaccttttgatccacccaccttggcctcccaaagtgctaggattacaggcgtgagccaccgcgtctggcgagttgtaagagtttttaaaatgtattctggatcccagtctctcatgagatacagctgtgtgttgcttaattactgggatatggtctgagaaatttgttgttaggcaattttgtcattgtgcaaatatcatagagtgtatttacccaaatctagcggtacagcctaatacacacctagactatctggtatagcccatgctcctaggctacaaccctgtatatagcatgttactgtactggatactgtaggcatttgtaacacaatgttattcatgtatctagacatagaaaagatacagtaaaaatatgatattataatcttatggggccactgctgtataagtggtctgtcattgaccaaaatatcattatgaagtgcatgcatgcaatatgacttgcaaatactttttcctagtctgtgggttaccttttatcttttttgatggtgtctgttgaaacacaacaaaatacttaatttttttttttttgaaacagagtttcgcttttgttgcccaagctagagtgcaatggcacagtcttggctcactgcaacctccacctcctgggttcaagcgattctactgcctcagcctcctgagtagctgggattataggcatgcaccaccatgcccggctaattttgtatttttagtagagatggggtttctccatgttggtcaggctggtctcgaactcctgacctcaggtgatccagccccctcggcctcccaaagtgctgggattacaggtgtgagccactgggcctgttcaaaagacttaatttttatgaagaccaacttagctattttttatcttgtcatttatgctttcagtgtcatatttaggaaggttttgactaacccactactgtgaagatttattcctatattttcttctaagcattttatagttttagctcttacatttatgtcttacatttacatttatattaggtcttacataatccatttgagttaacttttgtgtgttgtgtgaggaaggggtttgatttcattattttgcatgttgacattcagttgttctagcaccatttagtaaaaagacttatttatttatttatttattatttttatttttttgagatggagtctctctctgtcacccaggctggagtgcagtggtgcgatctcggctcactgcaacctctgcctcccaggttcgagcgattctcctgtctcagcctccccagtagctagaactacaagcgtgtgccaccaggcctggctaatttttgtatttttagtagagacggggttttgccatgttggccaggctggtctcaaactcctgacctcaggtgacccacccacctcggcctcccaaagtggtggaattacaggcatgagccaccacacccggccttgtttatttttaaattggagattagtttgggtaagtattaacagcagctaataaattatgtctttttctccctattgggaaatgactggggagaaaagtatggagagaaaaataaagttgaatgttaatttcttctcagtggcagaaagaactggaaggaagttatccagttattttattcttttgggtgtggtggctcatgcctgtaatcctagcactttgcaaggctgaggctggcagattgcttgatcccaggagttcaagaccaggcaacaaagtgagaccctgtctctattttaaaaataagaaatactatcaatggcagtgacagagaaaggaagaagggacctactccaatcctatgttgctgcttttctgaccagaaaatgtgacaaaatagttaagagacaagcaaagctcttgacagaggagatgttgtttagagaatactggatattcccattgagtttaaagctcctggcccagagggattaaagccaagaataaaaagtctcacggatgatataactcatttgttgctatcatttttcaccaaagtgtggacaacagaagtgctggaagactgaagacttgttgttgttgttgttgttgttttctttttttctttctttttttttgagatggagtctcactctgtcgcccgggctgcagtgcagtggtgcaatcttggctcactgcaacctccgccttctgggttcgagcgattctcctgcctcagcctcccgagtagctgggattacagacaccctccactatgcccagctaagtttttgtgtttttagtagagatgggatttcaccatgttgggcaggctggtctcaaaatcctgacctcgtgatctgcctgcgttggcctcccaaagtgctgggattacaggcgtgagccactgtacccgactgccttgtgtttttcaaaatgaataaggctggctgggcacagtggctcacgcctgtaatcccagcactttgggaggctgaggcaggtgagtcaattgaggtctgcagttcaggaccagcctggccaacatggtgaaaccctgtctctactaaaaatacaaaaattagctggacgtggtggcacacacctgcagtcccagctactggcaagctgaggcagtagactctcttgaacccaggaggcagaggttgcagtgagcagagatcaggccactgtactccagcctgggcaacagagtgagactctgtatcaaaaaaaaaaaaaaaaaaaaagggggataaggtgctcaattcctctagaagagagcttggcactcactgcagcaaaatcctagaatggcttttttttgttgtgtttttttattttattttattttattattattattattttttgagacggagtctcgctctgttgcccaggctggagtacagtggcgcaatctcagctcaccaaaacctccccctcccaggttcaaatgattctcctgcctcagcctcctgagtagctgggacgacaggcacatgccaccatgcctggctagtttttgtatttttagtaaagacagagtttcactatgttggccaggctggtctcgaactcctgacctcatgatctagccacctcggcctcccaaagtgctgggattacaggcatgagccaccatgcccagcttagaatggcttttaaagtggtcactttgtgattatttaggaagagaagaggtgactactaggagacacattggtttaccattcaaactgacaacatcttgttagtaattctctgtctatatatgtgctaattccatttaatagtttgtagtagcagctctccataaattatatttttaggttaataaacaatatttgaagggataggattgtcataataatttggagaattaataactatttcccaacaatggcttggtactttgaatttgaataaggattagaaaaagattttattgctataagtgcagcaccttgttaaattgattaattagatctgttctgtttacctaagaacatattttagagtaaaactcaatttaataaatgaacaaacttatttaggagtaattacttttctaagttctatgttttataagtcataattagaatatggattacaaactattctacatggaaccttcagggagatttgtcttatcttacagtaattattggtttaaagctaaccatgtgttggccaggtgcagtggctcatgcctgtaatcctagcactttgaaaggccgaggcgggatcaccccactgcatccaagcctgggcaacagagtgagacttgtctaaaaaacaaaacaaaacaactaaccatgtgttaatgtggaatgcaaagtttataactggagtcatttcattttgataaagcaaagttttattaaaaacaaatgtaggctggtgtggtggcacacacctgtaaagtcagcactttgggaggccgaggtgggcagatcacctgaggtcgggagtttgagaccagcctggccaacgtggagaaaccgtatctctaaaaatacaaaaattacccgggcatggtggcatgcacctgtaattccaactacttgggagtctgaggcaggagaatcacttgaacccggaggcggaggttgtagagagccgagattgcaccacaggactccagcctgggcgacagagcgagattccatctaaaaacaacaacaaaaacaaaacaaatgtagtattattgtttaagatgggaaaatggggaagaaaagcattccaagtaaaaggaatttctgattaggctttgtgtttccccacacaaaaatagccgtatatgttatttctgaatgtaaagtatagatgtaagcatggagatttaaagtacaaatataagtaggaatagtacaaaagcgggtatggaagtgctacaagtgagctttaggatagttatctctggggagaaaggtaagggaagagcagaggttagggctttagttgtacctgtaagatttcacttttttttttttttttgaaacagcatctcgctctctcgcccaggctggagtgcagtggttccatctcggctcactgcaacctccacctcctgggttcaagcgattctcctgcctcagcctctccagtagctgggattacaggtgcatgccgccatgcctggctaatttttgtattttagtagagacagggtttcaccctgttggccaggatagtctcaatctcctgaccttgtgatccacccacctcagcctcccaaagtgttgggattacaggcatgagccaccacgcctggcaagatttcacgtttaagaagagtgaggccaggcacagtggcttacgcctgtaatcccagcactttgagatgccaaggcaggtggatcacctgaggtcaggagttggagaacagcttggccaacatggtgaaaccccatgtctactaaaaatacaaaaattagccaggcatggtggcatgtgcctgtaatcccagctactcgagagaatgaggcagaattgcttgaacctgggaggcagaggttgcactgagcccagatcacgccactgcactccagcctgggcaacagagcaagactccatctcgggaagaaaaaaaaaaattgaaaattaagaagagtgagaaagagggtgagtttctcttgttatttcctgtatattagaaatattttattaattgaaaattggaaaactaaaaattagcttaattctctgatggcttttctaaatgatcgaagtatttacctcctgttgatttgagaatacgtaaygtttaaagggtatcaaggaagtttatttttagattcttagcatatattaataataacaaaagctaaagcttaagtttattaagcacataatacacaccatactaggtgctttaaatatactctgcttctttgatgttttcttcattcccatttaacagatggcaaggtgagctgtaatttcaatccattactggtgataaaatatgctaagtgaaaactccgattctcaaatgtcaagtttaatatctcaaagatcatttcttatgcaatagctttctgtttcccaagagttatctctacattttaatatgtttatttgagaaaaatcagaaaatatggacagggaaaaggaatataaaattgcctataatttcactatcactgggaggtaattaccactagcattttgatgagtgtcctttcatatattttccatgcataaatttatatgaactttcaaatgctttgagaagaaactgtgtcaagaatttctctgttagtattgcttctgacgtataatatagaataaatcaaaagcttggctttgggccgggcatggtggctcatgcctgtaatcccagcactttgggaagcagaggcgggcagatcatctgaggtcaggagttcaagaccagcctggcctacgtggtgaaacctcgtctctactaaaaatataaaaaattagctggacatggtggtgggtgcctgtaatcccagttcctctggaggctgaggcaggagaaccgcttgaactcaggaggcagaggttgtagtgagctgagatcacgccattgcactccagcctgggcaacaagaacaaaattccgtctcgagaaaaaagaaaagcttggcttttattccatacttgtctgtatttatctttttaaagcacagtttaatctggaaacaaaaaagaaaaacctcttcactttaaaaaacctatgtaacatatagggggaaaaaataagctacataggtttttctgattctgatatttattatagtgatgtatctattacaaaagaccaactgagaaattactacattatatttaccagtaaatgatagaatccataatgagcatattacctttgtggatggtttcttttcttttctttctttcttttttttttttttgtgagatggagacatggagtctccctgtgttgcccaggctggagtgcagtggtgcgatcttggctcaccgcaacctttgcctcctgggttcaagcgattctcctgccttagcctccctgaacagctgggactacaggcatgtgctaccatgcccagctaatttttttttttttgtatttttagcagaggaagggttttaccatgttggccaggctggtctcgaacccttgacctcaggtgatccgcccacctcagcctcccaaagtgctgggattacaggcatgagccaccttgcccggcctgtggacctgtggatggtttctttaaaagaacaagtagcccttcattttaagaaaaagggaaaaaggagcaggtgcaatggctcacgccagtaatcccagcactttaggaggctgaggcagatggatcacctgagccaggagtttgagaccagcctgtacaacatagggagaccctgtctctataaaaaattaaaaaaaaaattagccagacatggtggcatgcgcctgtggtcccagctactctggaggctgagatgggaggattgctgtagaggctgcagtaagccataatcacaccactgcactccagcctgagtgacagagcaagatcctgtctcaaaaaaaaaaaagaaaaagaaaaaagaaagaaaagaaaagagagaaaaaggaaaaagggaaaatggttatattaaatatgaaaaccaatatttcaaaacttaaaatcctgtcatgcagttgttagccagaatgctcaaaaaggaaacaaaagttaaactgagaaaaggtacaactttccgtattgttttcaaaacattatatagatatttcatattttcccaaatatctttgctcacttcagaaaatatgacattttttttctgcccttgattcctggcaaacgtccccatgagaaactaaatgttcattaacaaatatttattaagtatcstcatgtacaagacattaatccttcatcaattacataagcccaaagtaacagtgcaattttagacttcctgatactatttatgctttgtgtcatgcacggaaaacactgatttctaccatttttttaatctgttgagtacttactatgtaccaggtgctagtcttttwtttatttatttatttatttatttagagacagagtcttgctctgtctcccaggctggagtgcagtggcacgatctcagctcaccacaacctctgcctcctggattcaagtgattctcctgcctcagcctcccaagtagctgggattacaggtgcccgccaccatgcctggctaatttttttgtatttttagtagagacagagtttcaccatgttggccaggctggtctcaaactcctgacctcaggtgatccacctgccttggcctcgcaaagtgctgggattacaggcgtgagccactgctcctggcccaccaggtgctattctaagtatcaaggctgcagtggtttattgggccttcttttctcatttgaataaacaaacatacatatttatatctaattttgttcttgcaattttgccttatttttcccaaggaaggtccccagtaccatatagatttcaagccatgcaaagcttgaatctgcccctgctatggtatcaataaggtgacatgcttcaattcaaaacaatccctaaggtgtctaatattcaatgaggctgctgtccgactctcatttttgcttctaaaacacatcatcatcccaatcctgctctctgccagcaggaacaagttataacaagatctggaaggcaagctcatcaaaacacaagtcaccttttctccattgatgagtgaatttctagggttgccagatttggcgaataaaaatacaggatgcccagttacatgtgaacttcatataaatatcacatgggacatacttatactaaaacatggtttgttgtttgaaattcagatttaagtggcaacctatattttatctggcaactctatgaatttctcaaaaatgattcctccttcatttttctctctgtagaactagaacagttctcagatcgatcatagtggtgtcaagtactaacatcagtggctcttcttaaccttttctgggaaataacaatgtaatgcaacttatagatcttcttcccagaaaaatgcacgaacacaaaacactttgcctacagtttcagggccctaaagctcaactgtgtaaaccatcccttcctactgtttcccaacctcagacctctcttgtagatctccttgtttgtataatgctttatgatttacccagtgctttcaccttcacaatagccttataagaaaactagattatagattagtttagaaagtaggctgggcacggtggctcatacctgtaaatcccagcactttgggaggccaaggcgggtggatcacctaaggtcaggagttttgagaccagcctggccaacacggcaaaaacccttctctaccaaaaaatacaaaaattagccaggcatggtggtgcatgcctatagtcccagttacttgggaggctgaggcaggagaattgcttgaaccgtgagattgcaccaccgcactccagcctggccgactggagtgagaccctgcctaaaaaaaaaaaaaaaaaaaaaaagatagtagattagaaactatagattaatctatagattaagacactgagactagggttcagtaacaattacatactcagtaattgtaattatgattaagactcaaattcaattctcttcacttgaactgctgggctcttttcatcatkccagccttcctcataagtcctcctccttataatattctcatttccacaagcatatttggatggaagtcagaatgaaagagtgaaaagggcattcagacgaggagtcctgggaactggccttagtttcttcactaagaggccaagacacttcacctctctgggccttagcatctatgcagggagggagctggacaagatcctctgagaagaactaacattctgcgattctaaagcacccctttcattgtccctttcccctagcaggctgcagtaacccctatttttgtgacttctaaagtgcagagatgacaggtgttcctggaggattttgaggttgaaaaggygtaggactcagggagatagaaattgctctacttgggggtttcaagacctgtaacggaaaagagttccatctccacctagctagggtgtgatgggggtgagggtgtctaatgacacagagcaatgggatgaaacctccagtgcagaccccgggtttgcaggagagcacagcatcgcaacagtcaaattccaggctttctttttgctactgacctttgactgagcttggaagagacagagcctgcaactggggggaccccactcagaccattagtcctgctcacctgtccttatctactttccacggagcaaagggcttggagccactgatacctggaggctctttccccacttctggatttaaagggaagcttttacttggaagctcaagggaagaggatcctggattccacttcctggtgcccaaaagggagacaaactgaattcctgtgccagtggctatattctcttcttctcttccctggatgtgctggattcagatatttcaaagccccatgtgcctgagcctaataaacatctgatacctaacaggaatcctaactaataacctgaagtcaaaataatgtgtcaagaaatatcttggcagttatcttggtgggtttgccaatttgggaagatttctaagagatgctaacaaacttccagcctgggggacagagtaggactccgtctcaaaaaaaaaaaaagaaatgctaacaaactaaatgatatgcttccccagcatggtatgaagaagtgcctgtgtaacttccaggaaaagtcagagagggaatctgctctcaggaagcccaagtccacaacggtaacttgattcatagttatctgaacatgaagctttttgcataataaaaatcaacttgtaaaatacagacatgggctgggcgcagtggttcacgcctgtaatcccagcaatttaggagactgaggtgggtggatcacctgmggtcaggagttcgagaccagcctgaccaaaatggtgaaactccatctctactaaaaatacaaaaattagctgggcatggtggtgtgtgcctgtaatcccagatacttgggaggctgagagaggagaatctcttgaacccgggaggcrgaggttgcagtgaacggtggtcatgccattgcactcaggcctgggtgacagtgtcaaactctgtctcaaataaataaataaataaatacatgtgtgaaytattcccaagacacaagaagctagctctggttctgtctgtggacttggtggtctccatccttgccttgctacacacttgccctgcttcaaaagtccagttgttttacttcctattctcaaagcatggaaatatatgaaagtgtctgtcacgtgcgtctgtgtgaagagaccaccaaacaggctttgtgtgagcaataaagctttttagtcaccagggtgcagggggctgtgtccgaaaagagagtcagcaaagggtggtgggattatcattagttcttataggtttgggataagccgtggagttaggagcaatgttttgcgggcaggggtggatctcacaaagtacattctcaagggtggggggaatattacaaagtatcttcttaaggggggatggggcggccggaggggggggggttgggggaagaatattacaaagtaccttcttaaaggcagggcaggatattacaaagtacctcctcaagggtggggagggtgtattgtacaaagtacattcgcgggggtggggggggtgcggggggggaatgggggggcagagaatatcacaaagtacattatggcaaggggggtagggtgtattgttacaaagtcaattgatcagttagggtggggcaggaacaaatcacaatggtggaatgtcatcagttaaggcaggaacaggctattttcactgcttttgtggatcttcggttgcttcaggctatctggatgtatacatgcaggtcacaggggatatgatggcttagcttgggctcaggcctgacagtgtctttttatagactgtcagactgtattgtaatttgttcagtatctcacaaataattgactaccaagacacttataagtatcagagactggtttgttgcccattgtaaatttgtaaatacaaaagtgaatataaccttgggcataaatcttacctgcaaggaacttagagtctcctgaaggaaacaggtaaatatgcagtacaatccatttattttattcatttgttaaatcactctaggttccaggtatacaactgaacaaaacaaatggaaatcccaatttttttttttttgagacagcatctcactctgttgcccaggctggagtgcagtggtgcagtttcagctcactacagcctcaacctcctaggttcaagagatcttcccatgtcaccctcctgaacagctgggactataggcacgagccaccacacccagctaatttttgtattgttttgtagagacagggtttcacaatgttgcctaggctggtctcaaactcctgggctcaagtgatcctcccaccttggcctcccaaagtgctgggattacagatgtgagccagacctggccagaaatctctctttttttttttgagacggagtttcactcttgttgcctagggtggagtgcaatgacacgatctcagctcactgcaacttccgcctcccaggttaaagcaattctcctgcctcagcctcccaagtagctgggattacaggcatgcaccaccatgcccaggtaattttttgtatttttagtagagacggggtttcaccatgttggccaggctggtttcraactcctgacctcaggtgatccaccagcttcagcctcccaaagtgttgggattacaggcgtgagcyaccgcgcccggctactgaaatctctattttttaatttttaaatccctattttcatttttaatgatatccctgttttttaaatccctattttttttctagttgggctggaggggaatagactataaataaataataaataagtataaaatatatagtatgttagcaaaggataggttctatgggtggaaaaaggctggaaagaaggatacagtgtaggcatttgggtggaattaacttttaaataggatgatcagagaaggcctctttaagaagatatttgaccaatgacttaataggggtaagggaaggagccctggggagctggtgcctgccagagggactgcaaggaggcccctgaggctgtgagcagcttgggcactggggagaaagtagaaggagataaagttagagagaggtgaggggagagcacagggctttgtccttgcctaaggactttggcttttactttgcttgagataagaaatgatcagaggctcctgagtagaggagcatcattatctgaattagatttttaacaaaaaaggaatcaaagacctaaatgtaagagctaaaactataaaactcttaccagaacacataggaggaaagcttcatgacatcggatttcataatttcttagatatgacaccgaaagcacaagcaaaaaaagaaaatagataaattggacttcatcaaaattaaaaacttttgtgtatcaacggacactatcaacaaactgaaaaggcagccttagaggaatgatttgcaaatcatatatctgataagagattgatgttcagaatttataaagaactcctggcctggcactgtggctcacgcctgtaatcccagcactttgggaggccaaggcaggaggatcatgaggtcaggagttcgtgaccagcctggccaagatggtgaaaccccatctctactaaaaatacaaaaattagctgggtgagctggcggaagcctgtaatcccagctacttgggaggctgaggtaggagaatcacttgaacctgggaggtggaggttgcagtgagccaagattgggccactgcactctagcctgggtgacagaataagactctgtctcaaaaaaaacaaaaacaaaaacaaaacaaaaaaaaactcctacaacttaaaaacagcaaaactaaacaacctgatccaaaaatgggcaaaggaagtgaatagacatttctctaaagatttacaaatggccaataagcacatgaaaaatgctcaacacgactaatcattagggaaatacaaatcaaaagcacagtgcratactccttcacacacattaggatgacacttataaaaacaagcaggagccaggtgcggtggctcacgcctataattccagcactttgggaggctgaggcaggtggatcacttgaggtcaggagttccagactagtctggccaagagaccagcctgaccactatagtgaaaccctgtctctactaaaaatacaaaaaaaaattagccgggcatggcagtgggcacctgtaatctcagctactcagagctgaggcaggagaatcgcttgaacctggaaggtggaggttgcagtgagctatcacaccactgcactccagcctgggccacagagcgaggctccatctcaagcaaaacaaaacaacaagcagggctcagtggctcacacctgtaatcccagcactatgggagggtgaagggggaggattccttgatcccaggagttcaagatatatctgggcaacacagcaaaacactgtctctacaaaaaataaaataattagccgggcgtggtggtgtgtgcctgtagtcccagctactgggaaggctgaggtgggaggatcacttgagcatgggaggttgaggctgcagtgagccatggtcatgctgttagtgtcaccgatgtgccacaatgtagcagtctcttgtagtccaaggtatcacccaaagttctttgtctcacaaccaagaaagttgagtatggacatgaagggtgaagttggagcaaaaatttaataagcaaaagaagaaagctctctgctgcaaagaggggacttggaagagggttgtcatttttacagttgaattcaaaggcttttataagaaactgatgagggctggctattgcatttgcataaggcatgaatttgtggtagctccacgctgtcctcctagttagcatgcgggtccttagcttgaattactctatattcctttgttccctttactgcgcatgtgtcaggggatggaattttccattgtgggcatgtctgggcaagtcacctgtatagcttttttgtttgtttgtttgagacggaatctcgctctgtcgcccaggctggagtgcagtggcaccgccatcttggctcactacaacctccacctcccaggtcctggttcaagcaattcccctgcctcagcctcctgagtagctgggattacaggcacgtgccaccatgaccagctaatgtttgtatgtttagtagagatggggttycactatggtggccaggctagtcttgaactcctgacctcgtgatccgcccgcctcgkcctcccaaagtgctgggattacaggcgtgagccaccgtgccccgccctgcatagcctttcttatctgtgcagctgtgggcatgtcttaggcaagcccccctgtgcaagttcccttatctgtgcctgcaagctgttcttttgtttgaaagaattcaaccaaggacccaccctaactgtgtgcctgaccggtttcttcctttctcctctttcaatgtcactgccctccagcctgggtcacagagcaagactgtctcagaaaacaaacaaacaaaaacaagcattggtgaggatgtagagaaattggaagctttgtgcattgctggtaggaatgtaaaagggtgcagccattatagaaaatcatatgggccaggcaaggtggctcacacctgtaatcccagcactttgggaggccgaggcaggcagatcacctgaggtcgggagctcgagaccagcctgaccaacatggagaaaccccatctctactaaaaatacaaaaattagctaggtgtggtggtgcatgcctgtaatctcagctactcgggaggctgaggcaggaacatcacttgaacctgggagggggagggtgtagtgagccaacatcatgccattgcactccaacctgggcgacaatagcaaaactctgtctcaaaaaaaaaaaagaaawatcataaggtggctcctcaaaaaataaaacaatttccacatgatccaataatttcactygtggatatagggtatatacccaaaagaagtgaaaacaaagactcaaacagatgtttgtacacttgcgttcacagaagcattattcacgatagccaaaaggtggaagcaacccaagagtccatcaagcgatgaatgagtaaacaagatacagtttatccatacaatgtagtactactcagtcttaaaaaaggaagaaaattgtgacatgtggtacaacatggatgaacattgaggatattatgctaagtgaaggaagccaacacaaagacaactgctgtgtgatttcatttatatgcggtaccagattcatagagacagaaagtagaatggttgctgccagggtctgggtgaagactagggagtgaagatttaatgtttaatgggtatagaatttcaaccagagaagatgaaaaagttctacacatggatattggtgatggttgcaccattcggcaacacaaatgtgcttaatgccacagaatagtacggttaaaaaatggtttaaatggggccaggcatggtggctcatgcgtataatcctagcactttgggaggccaacgtggctgtatcacttgagctcaggagtttgagaccagcctggccaacatagtgacaccccatctctactaaaaatataaaaattatccaggcgtggtggcacatgcctgtaatcccagctgctcgggaggctgaggcaggagaatcgcttgaacctgggaggcagaggttgcagtaagccaagatcgcaacattgcactccagcctgggcgacagacagagtgagactccgtctcaaaaaacaaacaagcaaaaaggttaaaatggtaaacctgggccaggcatggtggctcacacctataatcccaacactttgggaggctgaggtgggaggatcgcttgaggtcaagagtttaagacaagcgtgggaaagatggtgatacccctcctcccttctctaaaaaacatacagaaattagctgggcatgggggcaggcacctgtagtcccagctactcaggaggctgaggcgggaggattgtttgagcttgggaggtcaaggctacagcgagccatgatggcaccactgcactccagcctgagtgacagagtaagaccctatcttgaaaaaaaaaattatgttgtgtgtattttaccaagcttttttaaaagttaaaaaaagaaatatttagggtttcaaggtgacaaaatttcatatttgattataatggacaggttgggggtggaggagagagaataaacaatttgaaggagacctcccgggtttctggtgtggtcaaccaagttcatggtaaagttatttaataagctacgtaacactagaggagaaacagatgttgaggtgaaaggatgtgttccattttggagcttggggtgcctataagtcatctaggtgatatctagaaggyagatgaatgtcgcatttgggtctcaccaaaggaatcagggtagatatgatagatttttttttttttttttttttttgagacggagtctcgctctgtcgcccaggccggactgcggactgcagtggcgcaatctcggctcactgcaacctccgcctccccggttcaagcgactctcctgcctcagcctcccaagtagctgggattacaggtgtgtgccaccacgcccggctagttttttgtattttttaatagagatggggtttcactgtgttagccaggatggtctcgatctcctgaccttgtgatccacccgcctcagcctcccaaagtgctgggattacaggcgtgagccaccgcgactggccagagatgatagatttttgagtcatttgtttctaaagagtaaagaaagccataaaatgagatgtctgcaaggctcttgtatcgttcgaaccgcgagagcagagcgcgccaacagacaacgtgaggcggtgtggaacaacacgctgtctcaataagcgcctgggtgctggtggactgaggcctaaaatggcgtcagctccaagtgagtccggggcaggggttttatagtcctctgtaaacaggcagtgtcccagtctgacgtgtctgctatgtagtacccgtacggcctccctctcaatcttccggcgtatgtgtcctccagccagctgtcttcctgcttctgctatcttgctgacgcacgctgctggtacaagtggccttgagccttggcactgggcctgagtaaggaggagttattcattcccttaagttttcaggccccggggagaatctttcaatgtccatggttgagggtgaaggtgagaagagtagagacttaggaccatctctaagagctcgaacatataagggtcaggcaaaggaaaaaaagcccaagaggaaactaagaaggagcaagcagaaagaggagactatggttccacgcagccaagagaagcaagcatctcagaaagaggaagcaatcagagtatagaaaaatcaattaagatctgaagaaatgccccctgtatttaccaacaagaaagttgtggagcggcggggctcaaacgggccctgcggccttgcggccgcccgggactccccgccaaagaagggaccgtcggtggcgtctgcggccccaggaggagctcatccgccarcccccaggagcaagaccaagaccgcaggaaggactggggccacgtggagctgctggaggtgctccaggcgcggrtgcggcagctgcaggctgggagcgtgtcggaggtggtggtgaacagggtggatgtggcgcggctcccagaatgtggcagtggaggtggtagcctccagccacccaggaaggtccagatgggggtcaaggatgccaccccggtgccctgtggccgctgggcaaagagactggagaaggataagcggacccagcagatgcgtatgcagcggttgaaggcgaagctgcagatgccattccagagcggggagttcaaggcgctgaccaggcgcctgcaggtggagccccggctcctgagcaagcagatggccgggtgcctggagcactgcacgcgccaggccccccgagagcccctgggaggagcagctggcccggctgctgcaggaggcccctgggaagctgagcctcgatgtggagcaggccccgtcggcgcagcactcgcaggcccagctctcaggtcagcagcagaggctcctggccttcttcaagtgctgcctgctcactgaccaactgcccctcgcccaccacctgctggtggtccaccacggccagcggcagaagcggaagctgctcacgctggacatgtacaacgccgtgatgcttggctgggcgcggcagggtgcyttcaaggagctggtgtatgtgttattcatggtgaaggatgccggcttgaccccggacctgctgtcctatgcggctgccctccagtgcatggggaggcaggaccaggacgccgggaccatcgaaaggtgtctggaacagatgagccacgaggggctgaagctgcaggcactcttcaccgccgtgcccctgtctgaggaggatcgggccactgttctgaaggccgtgcacaaggtgaagcccaccttcagcctcccgctgcagctgccgcccccggtcaacacctccaagctgctcagggacgtgtatgccaaggatgggcgtgtgtcctacccgaagctgcacctgcccctgaagaccctgcagtgcctctttgagaagcagctccacgtggagctggccagcaggatgtgcgtggtgtccgtggagaagcccacgttgccaagcaaggaggtcacgcacgcgcggaagaccctgaagaccctgcgggaccaatgggagaaagcactgtgccgggagctacgggagaccaagaaccgcctagagcgccaggtgtacgagggccggttctcactgtaccccttcctgtgcctgctggacgagtgcgaggtggtgcggatgctcctgcaggtcctgcaggcgctgcccgcccaaggtgagtccttcaccaccctggcccgggagctgagtgcgcgcactttcagccggcacgtggtgcagaggcagcgggtcagtgcccaggtgcaggcgctgcagaaccactacaggaagtacctatgcctgctggcctccgacgccgaggtgcccgagccttgcttgccgcggcagtactgtgaggcgctgggggcgcccgaggccctgcgggagcagccctggcccctgccagtgcagatggagctgggcaagctgctggcggagatgctggtgcaggctacgcagatgccatgcagcctggacaagccgcatcgctcctctcggcttgtccctgtggtctaccacgtgtattccttccgcaacgtccagcaratcggcatcctgaagccgcacccggcctacgtgcagctgctggagaaggctacggagcccacgctgaccttcgaggcggtggatgtacccatgttttgccccccgctgccctggacatcgccgcactctggtgccttcctgctcagccccaccaagctgatgcgcacggtggaaggcgccacgcagcaccaggagctgctggaaacctgcccgcccaccgcgctgcatggcgcgctggacgccctcgcccaactgggcaactgcgcctggcgcgtcaacgggcgcgtgctggacctggtgctgcagctcttccaggccaagggctgcccctacctaggcgtgccggccccgccctccgaggcgccccagccgcccgaagcccacctgccgcacagcgccgcgcccgcccgcaaggccgagctgcgccgggagctggcgcactgccagaaggtggcccgggagatgcacagcctgcgggcggaagcgctgtaccgcctctcgctggcgcagcacctgcgggaccgcgtcttctggcggccgcacaacatggacttccgcagccgcacctacccctgcccgccgcacttcaaccacctgggcagcgacgtggcgcgggccctgctggagttcgcccagggccgcccgctcggcccgcgcggcctggattggctcaagatccacctggtcaacctcacggggttgaagaagcgggagcctctgcggaagcgcctggcctttgcggaggaggtgatggatgacatcttggactcygcggaccaacccttgrcgggccgaaagtggtggatgggcgcggaggaaccctggcagacgctggcctgctgtatggaggtggcgaacactgtgcgcgcctccgaccctgccgcctatgtctcccacctccccgtccatcaggacggctcttgcaacggcctgcagcattatgctgctctgggccgcgacagcgtgggcgccgcctccgtcaacctggagccctcggatgtgccgcaggacgtgtacagcggcgtggctgggcaggtggaggtgttccgtaggcaagacgcccagcggggcacgcgggtggcacaggtgctggaaggtttcatcacccgcgaggtggtgaagcagacggtgatgaccatggtgtacggggtcacccgctatggcgggcgcctgcagattgagaagcgcctccgggagctgaacgactttccccaggagttcgtgtgggaggcctcccactatctcgtacgccaggtcttcaagagtctacaggagatgttctcggggacccgggccatccagcactggctgaccgagagcgcccgcctcatctcccacacgggctccgtggtggagtgggtcacacccctgggcgtccccgtcatccagccstatcgcctggactccaaggtcaagcaaataggaggtggaattcagagcatcacctacacccacaacggagacatcagccgaaagcccaacacacgaaagtagaagaacggcttcccgcccaacttcatccactcgctggactcctcacacatgatgctcaccgccctgcactgctacaggaagggcctgaccttcgtctctgtgcacgactgttactggacgcacgcagctgatgtctcttgtcatgaaccaggtgtgccgggagcagtttgtccgcttgcacagcgagcccatcctgcaggacctgtccaggttcctggtcaagcggttctgctctgagccccagaagatcttttaggccagccagctgaaggagacactgcaggcggtgcccaagccaggggccttcgacctggagcaggtgaagcgttccacctacttcttcagctgacaccccacgagccttgtgccagtgtgtaaataaagctcttttgccaaaaaaaaaaaagaaaaagaaagttgttggtgaagtggaaggagcctttacctggtgtggcgcaggcagcagccatgttgtggtgaattgaggaatgggtagaaagtgagacagcaagtgtagacagaccttcaaagaagtttgagaagactaagaaaaataaatgctctctattcacccagattcaccgtgccgagggtctttttttttttctcttttttcttttccttttctttgtgtgtgttttgtttgtttgtttgtttgtttgtttttttgagacgacgtcttgctctgtcaccgaggctggagtgcaggggtgccatctcggctcactgcaacctctgcctccccagttcgaacgattctctgcctcagcctccctagtagctgggactacggatgtgcgcctccaccacgcctggctaatttttgtatttttagtagagacggggcttcaccgtgttgaccaggctggtcttgaatgctggcctcaagtaatccacccacctcagcctcccaaagtgctgggattacaggcgtaagccactgtgcccagcttcatttttctataattcttattctcatttctttctatctttctctctctctcttttttttttttttttttttttkkgcaatttactgaatcagaccatttgggagatgtaccaaaggatttaaaatttagactttgttcaacagtttaaaattcattccagaaaaaaacagcttggtgctatgcatgatttgatttcagaatttcagttgacttcatctgcagctgctcatgataaaactaatcaacagacataggtcagctctagagaggaggtttttgtcttctgttttgttttgttaatttccatctgaaagcattgtcttctttggtgcaagcagaagcaaattatcttttactagcaaggtaaagagttttgtacagaaacctgagttaaccagcacatttctcattttcgtggcatccagtatgtcctggtgccctgggtacctggatttcttattccttaatatgcttctttcccctacctaaacagaactgtgtactccctctgaccttcccccaccctttaacttgtcttgattagaggtaatacttaccatgacattgtaattgtttttgcatcaatgtcctttacaagactatgagcttgtttaggtcagacaccatattgcctttatagtgcctagtgggccctcaataaatgagtgaataaatgccatgggcagataggaaagatcgacaggcactagacctgcatatgggacctgaagtctcactgggcaaagcttgctttcctttttttttttttttttttttttgagactgagtttcgctcttgttgcccaggcttgagttcaatggctcgatctcggctcaccgcaacctccgcctcccgggttcaggtgattctcctgcctcagcctcccaagtagctgggtttacaggcatgtgccactatgcccagctaatttttgtatttttagtagagtcggggtttctccatgttggtcaggctggtcttgaactcccaaccccaggtgatcagcccaccttggcctcccaaagtgctagaattacaggcatgagtcaccgcacccagcctactgggcaaagctttctatgtgatggtaagaaacactaagcaatctttacttgccaaaaatttaaagaatttaggcacacattggctttttttgagcatagcccacaccaagcacttactatctctaatttgatgcaaagaagaattaactgcaatccaggaattgacctagcatttttacacatttttaaaaaattgtcataactccatgaggtcatttttattagcttctgttttacaggttaaataactaaattcgaagaggctaagtaaatccatgatccttgagccaggaagaggtggaactggcctttgaatccacccctgctttctccttccaccatgtttcctattatcactacacattacatatctcaatacggagctataaggaacaagggacactcaagcattacagtaattagaattttcatataatattccagaaatcagagactaattctctccagtttcagccctgaaatcgaaatacagtaatgttagaaataaaaatgtctcttgattttcccccaaggaatttccctctcttatccatgcagtgagcattaacaattaatggaaaatgctttctaaaccttatagcatcgttcttaatatttatgatgcccacgaaacatacaaacatctgttccgtagagtgatagctattaaagcatacttaagtgccaagcactctctctcacgtagatgagtcaatactttaagcatttgcccctctggagttatctaaatagcaaggattccaagaagatggggagaagacaattttagactcaactgaaggaatactacttcattttatcatggctgaaagtacacagtaattttaaattgaataaagttatttgtaaatggttgacatgatctttcatattagcaatgactgcacccctaaagctgaagttgaggtttctctctgagaaataaaattagaaaacactcaaaaggtgatggatgagattatccatcagcaggaatgacagagctgagaaatctgctgttaaaataaaactgaagggttgggcacacccaaaatccaatcaaggtgacctgtaagcaccctcagggagcaggcctagagagaggttactactattttttggccatgcgtggtggctcacgcctgtaatcccagcactttgggaggccgaggcaggtggatcgcttgaggtcagaagtttgagaccagcctggtcaacgtggtgaaaccttgtctctactaaaaatacaaaaattagctgtgtggtgggtgcctataatcccaactactcaagaggctgtggcaggaggatcgcttgaacctggggggcggaggttgcagtgagctgagattgcgccactgaactcctgcctgggcgacagagagagactctgtctcaaaaaaatttaaaaataataatattttacagtgcttgtaaagagaatatgttaatgggaagagagtggtctgcttgggtctctgatagctgcgtcaagtcagtggagccaataccttcaccagaatgtcctgtgtgacaataaaatttgttgtgacaaaataactggcacattgatatatatgtgctagtatgactcatgtgagctggtctctgtgtatactaacaaaatttagtttagcaaagctgaggaccagactttaaatatggaaatcacacgcaagtaccgctacccagactttcccagctgacacttcttcaaattgcaacacacacaagattaacataacagccacagcgataatcaaaatggcaactaacaattgatgagtacttattaaatgtcaggtatacttctaaagctctacatatgaatttcccattgagtcttcacagaaatcccatgaggtaaaataaaaaacagaagcaaacacagattatgtaatatgttctaggtcacatgttaatgagtgatggagactaaatttaacctaggtaagctgtctgcatttttagccacacctggggagggaggagcgccacactaattttgtagaatacacacacacacacacacacacacacacacacacacacacatatatgttaaggtggctcatgcctgtaacccaacactttgggaggctgagacagagtctcactctgtcacccaggctggaatgcagtggggcgatcttggctcactgcaacctccgcctcccaggttcaagcgattctcctgcctcagcctcccgagtagctgggattacaggcatgtgccaccacacacagctaattttgtatttttagtagaggtggggtttctccatgttagtcaggctggttgcgaactcccgacctcaggtgatcctcccacctcggcctcccaaagtgctgggataacaggcgtgagccactgcacaggactgggttttttttgttgttgttttttctgggtttttttttttttttttttttttgagacggagtctcactctgtcacccaggctggagtgcagtggcgcaatctcagctcactgcaacctctgcctcccaggatcaagcaattctcctgcctcagcctcctgagcagctgagactcaaggcatgcgctgccacgtccggctaatttttgtatttttgatagagacggggtttcactatgttggccaggctggtctcaaactcctgacttcaagtgatccgcctgccttggcatcccaaagtgctgggattacaggtgtgaaccaccgcacctggcccaagcagattcttttggttgcaagatacaaaactctacttaaacgatttcaaataaaatgtttggtgaagttcaccataagccaagtaagatattcttctctcagctgggcgtggtggttcacacctgtaatcccagcactttgggagtccaaagcgggtggatcacctgaggtcagagttcaagaccagtctgaccaatatggtgaaatcccgtctctgctaaaaatacaaaaattagccaggcgtggtggcaggcgcctgtagtcccagctacttgggaggctgagacagaagaatcgcttgaacccaggaggtggaagttgcagtgagccaagatcacaccattgcactccagcctgggcaacagagtgagactctgtctcaaaaaaaaaaagatattcttctctcatagtaccttgggcttattgcattcactacactgcattataattatgtttatatattcattataattatcccactcgaccccaataaattcatgatttttctctcttgtatttactactatatccttggtacaaagaacagtgtctgacaaatagtagatgctgaagaaatatttgttccaataaaaagtaggattggaggctgggcacagtggctcatgcctgtaatcccagcactttcggtggccgaggtaggcagatcacttgaggtcaggagttcgagaccaggctggccaacatggtgaaaccctttctctcttttttttttttttttttgagacggagtcttactttgcttcccagggtggagtgtggtggcgtgatctcggttcactgcaacctccaaccccctgagttcaagtgattctcctgcctcagcctcccaagtagttgggattacaggcgcctgccactgcgcccggctaatttttgtatttttagtagagacgaggtttcaccatcttggccaggctggtcttgaactcccgacctcatgatccacccgcctctgcctcccaaaatgctgggattataggcgtgagctaccgtgcccagtgaaaccctttctctatgaaaaatacaaaaagtagctaggtgtggtggtgcacacctgtaatcccagctacacatgagactgaggcacaagaatcatttgaacctgggaggcagaagttgccgtgagcagagattgcaccactgcactccagtctgggcaacagagtgagactctgtctcaaaaaatgtagaattggggcaattgggcagggacaggagtgttagttaattacctgaatgattttaaaagtaagaaagtcagccagagttcacagaaaccgaaaattcaagaacagaactcatttttctatcatgcccctcaaccagcatcttttgcttctgctcttgttggcatatatattccattttcctttttttttcaagtgggcttcctttgattatttatactttctgcttccccataattttggcttttgttaaactttggttagccgtagtgccaacctcagttccaactctagttggccttccagttctagagcccaccactacctacagacttaaggctttctgattaaggttctcaggataaagattctcattggttcagcttaggtgaagacatcttcaattgtccaatacaccatggtaggagtggttgacaaaaatgactgtctaggcttgcc

SEQ ID NO: 95542 - DNA, 41747 bp, Homo sapiens
tctcaaaaaaaaaaaaaaaaagccaggcacggcggctcacgcttgtaatcccagcactttgggaggacagggtgggtggatcatctgaggttgggagttctagaccagcctgaccaacatggagaaatcccatctctgctaaaaatacaaaattagctggacgtggtggcgcatgcgtgtaatcccagctactcgggaggctgaggtaggagaatcgcttgaacccaggaggcggaggttgtggtgagccgggatcacaccattgcactccagcctgggcaacaagagcaaaactcttgtctcaaaaaaaaaaatgtggattctgtggtcctgaccaggtctctggaatcagaatatgaaatgcaactaggaatccgccttcttaacaagttccctaggtaattctttattcaaaacttttttgatgttgtttatattttgaaatctgtcacacatacagaagagtttataaaccatatatacatagtttctaacataaaaattaaacaaacacctgtgtacccactacccaggttaacatattgaagattgggagctctggtgtgcccagttgtttggtacaccttctcccccatcacagggaactactatcctaactttcgtggctttcatttccttagtcaacctgttaggaatcgactccatgtaacacacgaaaagcagcttgcagaaacactggattcacacatggaggagaaatgccaactcacaggcaagcacagtgatgacaaaaaaaaaaaaaaaacactgcagagattgagggatccttagaggatgtcggtgtatgaaaaagtatttaaacatccccagttttgtagatgcttataaggtgaacagcaccaacgcaatgctgatgcagaaattcacatcccagcggggcacagctgctcacacctgtaatttcaacactttgggaggccgaggtggacagatcacctgagtcaggagttcaagaccagcctggccagcagtgaaacccatctctactaacaatacaaaaattagccaggcatggtggcgggcgcctgtaatcccagctactcagcaggctggagcaggagaattgcttgaacctgggaggtggagattgcagtgagctgagatcgcaccattacactccagcctgggcaacaagagcaagactccattgcaaaaaaataaaataaaataaaaatcacatccctggttcaagaactcaaagaagagaggtttaaagaagaaaagaaaaaagaagagagatccagactctctaagcaacaagaagggctggcagagacgttatctatgctggagtccctggaagaggccatgggagtcaccccgtcacaaggagcttttccacaccagccaggcagccaagagccaagccctgctgctcccttccccaggagggcttgggtcttagggcagcgctgttctctcccctccactcaggcctccagagctgccaggccaggttctcccatgttgactccatccgagggtccctgaggccagtggatctaggggagcccctttttgtgttgaagtttccaccttccccttctgacactgcagccagctccttcatggttgattcctccaaatctaaagaatacaggagaccctggagcacatcagcaaagtctggattctctctcattagcagcaaaagaaatgccatactttagagcctcatcttttgctcaaactgaaacatcatcaaactgcatttctcaagacaatgctctgtaaatattatttatgtattaatctcctaggtgaacaatttctattttatcctctacaaaattattgcactttgaaaacagatttcatttatcaatactttcggtactcaactgcaatattttttctagagttatagtcccaacaattttaagtcataagttaaagcaccattttttggcttgagtatgtatttgttgaaaaatttggccgggcgtggtggctcacacctgtaatcccagcactttgggaggctgaggcaggcggatcatgaggtcaggagatcaggaccatcctcgctaacatggtgaaatcccgtctccactaaaaacacaaaaaaaattagccgggcgtggtggcgggcacctgtagtcccagctactcgggaggctgaggcaagagaatggcgtgaacctgggaggcggagcttgcagtgagccaagatcgcaccactgcactccagtctgggtgacagagcgagactccgtctcaaaaaaaaaaaaagaaaaagaaaaaatttatgcaaagggagatttattttgggataaagtaaaagggaatgtttaaagagaaatttctataatatttagattcaaatagtggatatttttcaaaaaacaaaattaataaattacatggagatggttttatttcactacaagagtgatgtagggagagatttctaagaagaaatccccttggacaacattggggaaccccacatcacttttccccatctcctctcaattagccaccacgcctggctaattttttttttgtatttatacatttttattttggtatgtaagagagatacctgacaaaagtaacctgaattaaactttccatttaaacttcctctgtgtctttatgttgagtcaggcactgtatttagataactgtaaattatttatcaagtatgaatggaggtcactcaccctaatagttaaacagactggatttacataaatgtggggcaatcttggtaggggtggtcagcaaggcctctgtcgggagggagcacctgggcaacgaagacatagggaagaactttgtaggaaaagggggtagaactgacaatagccctgaagggggcatgagtctggtgggcgtgaggaccatgcagaggccagagtggcctgaactcagtgaacgatggccagagtggtaaatgagtgaagggtaccaggggtctgagaatggaggggttttccccacagtaagagtttcatttcaatataaaagttcagaggcagcctgcagggaacatagtaaagcaggaagaccaggtgggaggctgtgacagtcattaagggtgagaatggtgacagctggaccaggggagtagtggagggggggatggagagatgggctcgagtccaggacctgtgctgctgccagagaccgagagactcactgaggcctgcgggtgccagagaaaaggggagtcaggatgaggacaaggagtccactgtgagcatctccctgaggggtggtgtcctttgctggaacagagagggatggcaaaggacgggcatctggatgataaattggaataaatgtttgggaggagacttgggaacaggaccttttgacactagagtagaaataccaagtgctcagatggacataggtggagaacttggaggagcaatcacagcatcagcaaggaacgtggaggatcattggggcgtgaagttactattacacagaagtccaagtcctgggcagattccaaggggtgaatgaaatgagtctgctagtgaccagaaccctcctcaggtctcccagtagccacaataccacaaaaagcctcaagagtgacctccccaagtctgttcccattaggggacttgagttgtgcagaatccgtataagacagcctccaccaaacacgtgtctatgcaggtccacgtgccatgtacatacgtacgactgatgaagatcccctccttgaccaagctctagccaggcttccctgagcccccttttcaactaggcctccaccttggcctatgaaatctgcagacttcagcaaaaaggatcgggtccatccttccccctatatcaaaacgcttaaacacacagtttctttttctttctttttttttgagacggagtttcgctctgtcgccccggctggaatacattggtgcgatctcagctcactgcaacctccgcctcctgggttaagcaattctctgcctcaagcctcccaagtagctgggactacaggcactcaccacgatgcccagctaattttttgtatttttagtagagacggggtttcaccatcttgaccaggctgatcttgaattcctgaccccgtgatgcacctgcctcggcctcccaaagtgttggggttacaggcgtgagccacagcgcccggcctaaacacatagtttttaactgctcaaagctgcatccataggatgaccccagaccccctaaagtatcttcctgggaaagctgccaaaagaactcactgttggctattgccaacaccttacaagcagcccctgatgtccctttcttaaagagttaacaacaacaacaaaaaactaaacaattgtgaatccttcctctgtctctctgggatgtaatgtctcctacacatcaggagtatccttctcaagaacctgaaagccattcctccaacatgcaatcaccaggaagcaaagggcctatctcccagttactgtgggaggataggaccctgactcccataacagccatctaacaggcactgtcgcctaaccttacttacactgacccacccttcacaagtttcactttcctgactactgagttcctgctcatccccttcacattccctcctcctccctcttaaacacctagtcacttctgcacaaagttcagttccgttcacgaggtaccttcttccctattacaatagtatattattaaaatctgctttaccacttttactagtgtctagctttatcttctacagttaatacaaatatacgcacatacacatgcatatatatgcacacataataatatatacatacacacatacacgtatatatacatctatatgtgtattcttaatgaatgttatgtcttctctaatcgtttggaagatattatcaagtatttctttgcagttttcctatgatctctgcgtttcttttctgttcctttggtcccttgcttcggtgtgtgttttctttccatcttttatgctagaggaagtccgcaagcaacaagtggtcctcggctcccactcctatgtatgtatgtagtaggaaggaagccgctgagtgcagctgtgcgcgccggggcggtgcctgtgcctctctggattccgtgtttcttcgggggtgctgagcagcggtgcttccgcgtccgcgttctccgggtagctgatgtgctgcaggctgcagcccgcgtggtcgcggctcaggtccgtgttgggctggtaggactccagcggggagcgagcattcctccggaacctggggctggacgacagcagcaggaggcgtgctcccatctccggtagtccccggctcccgctgctcccctttctccccggcctcgggcgctggcgggcgcgggcgagggggtagcgcaggggaggcccgcccgccacggcagggggcggaaaccgcggccgggctcggggtcagcggcgacgagcgggcggctgccccgctcgccctcggcctccgcgcccgcccggccgctccgcagcggaggagccctcaggtttgcgttactgcggccgccacacctacctcagcccgccgcggccaggtcgggcggtgccgcgcaggccgcctccccccctcgcttcccagtcggcttacgcatccccggcggcggcggcgccggcatcggctagaggttcggctcaagtcgggggcactcgtgtctgcgccgagcggcgggcgtgagcgcggcccctgggccccgcgcggcgcggtgctgcgaggaggatcctcgtggccttgccccgccggcggctttccagaattttctacgattacgaagttttggcattcaaccctccatcctctcaaacgccccactgttactccgcccccttcccctaggccccgcccccagccgcagtgccctgcctcttccatccgtctccagcctcctccacggccccgccccctcaggccggtccgtctcccctcccacctcacacctccgccccgcccgtcagccctggctccgcccagccacggggctcgccgccacaggccccgcctccagctcgcggccccgcgcgccggatcggcgtgcgtgcggctggagccttaagcgtttcccccgcccggcttcatccctgctggcggcccagcgtcgttctcctcctgcgcgaggcggccaaggcctgctggcccggagccgcgcctccacccgcgcgaggtagggcttcgaggaccggcgcggcgcaggtctccggaggcctcccgagaggggctagggtcgccgggccgcgcgtgggagcgggtggggcccgggaggagacggcgccccggaggggagtgcgaggcctgggccgacggttacgggcgccgaccggcgttgcctggcctgaacgcccggcctttcggtggagggcagcttgcccctgtatgttgcgcccttccgtgggtcagaccggcggcaaggtgaggcggcggcggcagcagcagccgccttgggctcctggacgcgctcccgaggtggggcgrgttggggagtggggattggagcgtgatggctggacgtcgccttctcggcgcggcaggtcccgggagacggggggacgaggcgcagtcccgccctcgggagagcggagccaccttcactgagggcgcccggtttggccccggaaaggcaggaagggggcggggaagggatggcgagctcggggtgcaccgcctgtttcttttctggttaggtatcgtccttggagaagatggaagcggagaggcggccggcgccgggctcgccctccgagggcctgtttgcggacgrgcacctgatcttgtggacgctgtgctcggtcctgctgccggtgttcatcaccttctggtgtagcctccagcggtcgcgccggcagctgcaccgcagggacatcttccgcaagagcaagcacggrtggcgcgacacggacctgttcagccagcccacctactgctgcgtgtgcgcgcagcacattctgcagggcgccttctgcgactgctgcgggctccgcgtggacgagggctgcctcaggaaggccgacaagcgcttccagtgcaaggagattatgctcaagaatgacaccaaggtcctggacgccatgccccaccactggatccggggcaacgtgcccctgtgcagttactgtatggtttgcaagcagcagtgtggctgtcaacccaagctttgcgattacaggtatggtcttcgtggacactcactgtcccagaatgcgccgtgggaatcaggatttcatagagtggtgtagaggcctgctttaatctctgctgatgacctaaactcattttgaggaarcaagctaataaataaacatccctgagtttgtgcaagcgtggcagctttgcagtagtcatttgctgagacgatgcatccagcctccactcctcagccagcctgcccttttgggtaataaaacttggctcctaacgttaatacagaggtttctaagtggtgcctgcttcatggccactgtatattttagcttttgttcctatcgattatctccttattttaaataaggaaaaatgaaatatggacaaattaacttttcccttcagccgcaaaactgatgggtcacaggttttgtactatgaatgtgcagtgaaaacaagtgtcattccaaggcagcacttttatgtcttttgctaatatagctgttggtaccatagcgaaatatactcaaaaagaacactgaaaggaatattccttttgacgcttggtctttcaggacatgtagaatcttagataagtgaccttgattaagccaagaatattttaatgtcttttatatacacactggacaacacatttttgtccttaaatattgtttgaaaataggtgaagatgtcctttgctgatgttggaaattggtaaaggagaatgctgctttgcaaatgatctattctaactcagttcacagttgagaaaattaaagcccgttaggtccactctggtaaaataggactggcctccaggatttccagctctggactaacacttagcctcctttgagccttaagtctggacatcttcattgtaatgggttttatttctgacaagtagaaaggcgcataaacatgcttaagaaatgaaataggcagtaaataggaagctgctttttaatttttktaatttttttttgcagaaattctttcattagcatgaacgctattataatgtcaatacctgtttttaagtcttattttaaataattttacacattatcaaagaggcttaagaataaatgttcaaaataatgtattctagacaactacaaagttttgtaaccatgcatttttatttggtatctttaaaaattaaatgctgtccttctggcatcagtgagagccaagttagcagggactttaaataaatttcataatgaattgagtattgttctatttccttcccttctctggtgtagcctccagcagtctgtgtctgtgcagaattatattaaaaatggtttccataaataaccgtatttcaaatactcttgaacacataatcatgcttctgatcctccacccaaatgatctttctaaaaatgcaaatctgatcaagtccctgctctgcttaaaatcctttaaattgctccccatcgggtaagctgactgttttacagtgtaaacccctaagtgctttttcacagggtacataaggtcctagtactttctggcctctgtccttttagttttatctaccaccacctgcattaaactttatgcaccagcaacactaagcttcttgtaatttccttaaaacgtcaggcattttctgacatttctgcccctttgctcaaagctttcctctcagtattcttctggctagcttctaggcacccttaaagacccatcccatgtccttgtcctttccttcaggaactcttacctgatctactcagcttccctcctcccccagtttttcctttttggtgataacgtaatatcctatatctcagtggttctcaaagtaaggtccctagaccagcagcatcagcatctcttcaaaatctgttagaaatgcaaattctagggttgctagatttagcagataaaaataaaatattgcagaatttggaacataaaaagtttctctgaaattcaaattcaactaggcattgccgtttttttgttttttttttctggcaaccctagcccaaccccagacctactaaatcagaaacttgggctggacatcagcagtcttggttttaacaggccctacaggtccttctaaagatggagaaccactgctatatttacatatctttaaaaacatgcacctccgtctcttaattttgtatcctcccattgagcacactgaatctgtgtgataataaatcttcttttcttcattagtgcatttttacagagtaaccccttaccccatgatagaaattgtctctgtgtaatttaggagatgtttattattcccaagagaagagaccacagtgtcctgaagttgtacatattctacagtgttctgaactgatttatgttggccaataattgtatacaggattacagtctcctgtgaccttctgtaggaatgagatattttggaaggagaaacaaaataaatagctacttagaacctttaaacacagaccagacagtcctctggattttatctagccctgaggagagctccttccctgtctgcatctcattcttagggaagtgagtgaactctgcagacaagttacatttcaaaggacactaatgagagatgatgactgagtttaaagcctgcagaataagtgagaaaggccctttaatttatactcattcgatcattatacttattgagcatctatttttgttctagacactgctagagtctactttgtctgtagattttttctttttgtgtgctcctgtttctacccccaaccactacatcttctttttcttcttcttatctctcctctgactaaaatagggaattaggttatatttttacatattcaatatatttattaaatgaacctttgtttcttgtagtgttctatctcattaagagaaaaagaacttaaagtgctttttaatttattggactttttattcattacatctaccccacgcctcacacacaattactgtgattagtaaaacaaagctgctgactctcagaaggcagttagattggcctcagtgtaactagtctcagctttgatcataaattttgtttctatattctattggtgtgtgtttattcatttcattaattatctgaaacagtgaaagataccaaatcatcttctagagcagaggtgggcaaacttactgtaaagagccaaaagaattttcggctttcccaaccatttcgtctgtcataattacttaactctgccatagttgcagtgcaaaaccagccatggacaatacataaatgaatgagcttacctgtgttccagtaaaacttcattcacaaaatcagatggcagacatatttgcagtttgcagaaccctgttctagtgaatcttataaatgaccatctcaactttatgtataattcagctgcctccttcagcacactaaaaaagagagctattgtgaccaggtaattttttagagaaaacaagccttgttaaacctttttttttttctataaatactactgcacaagaacggcatataaattcatgaggcattccatattttcatatgaaggaactttctagagtaatgttctatatcttgataagggttttagttacgtatgttcatttatcaaaactcaggaagtatatacgtacatttcattgtatgtaaattttacatgaaaaggaaaaaacatcatgaattctaggtagtgataagcctatttgctgatgtattcaggaagtattctgatgtcttcagtttacttggaaatgtactaaaaataagatgaattaatggatagaaatgtgacaaagcaattacagtaagatgttaatggtagaatgtaggtggtaggcatacctgtaaaaaatatttttaagtaaaatattttaaaaagcaagtaaactattcttgcttttagaatatatttgctaaaatattgaagggtgagatctcatactgtctgcagtttactttcaaatgatcaaaaaaatatgaatttatatggaaagagaatattgtgggagaaaatgtcattaagaatcagcgtgaagggtgggcttagggtattcattttgctatccttttgacttctctgaaagtttggaatttttcaaaataaaaagaaaaaagatgatmagctgttacccaatgacatgatgctaaagctgaaataccaagacattttagtaatgtcttatcttcccagtgagtttgaaatctaggttgttaaataccaattacaacataggtaaagacaataggattcaggtttgaatatggtatttctaaagaagaatgtaatactgagtaattagtaagcattttattttattttgttttttgagacagggtcttactctatattgcctaggctggaagacggtggcaagattatggcttactgcagccttagcctcccaggttcaagcaatcctcccacctcagccttccaagtagctgggactacagacatgcaccaccatgcctgatattttttttttcttttttgtagagataggagtatcaccatattgcccaggctggtctcaaattcctgggctcaagcaatcctcgcatcttggcctcccaaagtgctgggattgcaggcgtaagccaccatgcctggccctagtaagcattttagctgtacctttatagagcaaaggctcataatagctattatcttggttaaaataatcttttctgggctgagcgcagtggctcatgcctgtaatcccagcactttgggaggccaaggcgggcagagttcgagaccagcctgaccaatatggagaaaccccatctctactaaaagtacaaaattagccgagtgtggtggcgcatgcctgtaatcccagctactcgggaggctgaggcaggagaattgcttgaacccaggaggcggaggttgctgtgagccgagatcgcgccattgcactccagtctgggcaacaagagcgaaactccatctcaaaaaataatagtaataataataatcttttctgaaatttatgagaatttaataaatgataagtgttctgtcacaaattattgggggtagaaaagatggttttatgaatcgtgtcargacaagtgctcttgggggaggggagaaggttaactcttcataatacgccagatttattatgggtagattaatgcagtagtttgttttgttgttgttgttgttgttgttgttttttgagacagtctcactctgtcgctcaggttgcagtgcagtgacatgatctcggctcactgctacctctacctcccaggctcaagtgattcacccgcctcagcctcccgagtagctgggattacaggcatgcaccaccacacctggctaattattttttatattttcaggagagacagggtttcaccatgttactcaggctggtctcaaacttctgacctcaggtgatccgcccgcctggcctcccaaatcctgggattatacgcatgccccactgcgtccagccaatacagaggatggaaaagcccgacacttccatgagattctgaatggaatctatagccccagaaggttaagaagcactgaattaaagatgtaactatgacaactgaactgggaggggggggaataactataggtgaatatctaggagatggtaaaagacttcaaagcataacagcatttaattaggtgcctgtagcctagctactcaggagactgaggcaggatcacttgagcccaggagttcaggccagtgtgagcaacatagtgagacactgtctcttaaaaaaaaatttttggccagactcggtggctcacacctgtaatcccagcactttgggaggccgaggcagactgatgaggtcgggagtttttgagaccagcctgaccgatatggtgaaaccccgtctctactaaaaatacaaaaattagctgggcgtggtagcatgcacctgtagtcccagctgctcaggaggctgaggcaggagaatcacttgaacccagtatgtggaggttgcagtgagccgagattgcaccactgcactccaagcctaggcgacagagtgatactctgtctcaaaaaaaaaaaaaaattttttttaaatgaaacagcatttaagccaactacaaacggaaatacatatctgtatatatatttttaaaaacttaagtagattaaaaagacaattttaaagaacactgaagcatgtttgcaataaatatgccagaaaaaaggttgatattctagttaaataaaattacatgcaattattaaaacctagtgaaagatgaatatggaacatgagtgaattcacaaaagggggctgaaaaactcagttttacctactaatcagacttccagattaaaacaataggatacctttttctatcaaattatcaaagaaaaattaagtactaatgagcggtattaataagtgttagttatgatgggcactttcatgcactcgtaacaagcatattggacaaacatccagaaccttgggaaaatgcatgccctttgattcagtaacttctgagattgcaaagaaataatctcattcatttacccatgttatttatattttcaaaaataaactaaatgtcttttttaaaaaacagaaaaggggtcaggttttttttgttttgttttgttttgttttttgagatgaaatctcactctgatgcccaggctggagtgcagcagcaccctttcccgggttcaagtgatcctcccacctcagcctcactagagctgggactacaggcacacgttaccacgccaagctaatttttgttcatttttcttgttttttgggacagggtcagataaattatacgatattgacatgatgtaataatatacattctttacaaaccatgttttaaaaaaattgatatacaaaaaagtttatgatacaatgtagaaaagcattatccagatatatatacatcatacttctaagctgaaaaacaaacgtatacactataaaactgagaataaataagtcaaaaagttaagagtgactctctggatgatttttattttatgcctttttgtatttttaaatttttataagctagtatttaaaataatttttaaaatttatacaagtagttcatgtttatattctggtttttaggatctcaaggaatacatacaaaaaaaacatagcctaaaaacttaatattcttcccattcctcagtcctacttttcttcccagaggaaaccattatgaaataattcagtgggtatcctttctgattgcttttgatggtgatatactattttaaagttatggtagaccaataaataaagatattatacttcagccacataaccagtctattatagtttctcaagttgagtttaaaattaacaaatgtgattatgcaaattatttcagttttctctgtaacagattatgcagagaactcttgcttttagcagtaaataggactcgagtatacagcactaagtacttgacaaatctgaatatccaaaaggaaaaaacagcttaaaatagaaggtcaccagaggacctctgggtgaaagaatgtttatcctcttttcttttttatattcatttaattataaccattcttttctggtggcctgctttatctcttcagtcagatctgccttatctgtgagtggattaaatacttagcaaattaataatagaaacccaggacctttaccagctctgttctctgcttgttttaccaattgggtccaaacatagttgcaaatctgaatgcacatgttcttacgtctatttcaaaagcaagcatatgaattattttcgtattaactgacaaaaagaaatgcacggttgtacttacatttacaggttaagagattttcaagctggaccctcaggaactcttcaagggtccatgtcagtggggcatttaaacagcaaggactttaggcctcatgaacctacatttcagccaaagcacaaatatatataaaactatcattttagatcagcttttgtttatgtggatcatatctattgatatttaccatgtcataaattaaaactgataaattttttaaatatttttaaaataatagttacaaatggtttttatgaaaatttagtgaggagagttacattgttttaaatttttgcacatttctttcacttattattcagctagagtatcatatttgcttctattgtcatagcacatgtcataaagcttctggaaaattccactgtacgcttttgagaggttgagggtgaaataactctttagtgttattattaaaattttaacctcacagatgccctgaatggatcttggggcccacattttaagaaatgctgttaggcggggcacagtggctcactccagcaatcccagcacttatgggaggccgaggtgggtggatcatttgcggtctggaggtcaagaccagcctggtcaacgtagtgaaaccccatctctactaagaatataaaaattacccaggcggtagtagcacgaacttgtaatcccagctacttgggagactaggcagaagaatcacttgatcctgggaggcagaggttgcggtgagctgagatcatgccactgcactccagtctggtggacagagtgagaccctgtctcaaaaaaaaaaaaaaaaaaaaaagtgctgttagattaaactgccaaatatgttcaaaccttattgctccatttcactgtgcagatagtgcatatattttatttgccaaatgttatggtaagtagtgataaaattatgttttattttttaacaaaaatgattgttttgtgrgttatcattgagattatggtttaaaattagttaatgcttgtttcttccttccctcaggtgcatttggtgccagaaaacagtacatgatgagtgcatgaaaaatagtttaaagaatgaaaaatgtgattttggagaattcaaaaacctaatcattccaccaagttatttaacmtccattaatcagatgcgtaaagacaaaaaaacagattatgaagtggtaattagagtttatttctctaatatgattgatttttaaaaagctgcttaactcattgtttgagatagttaagacagtatgtaagaagaattggtgccaggaataaaataaacttaaataacagatcaagaccaaggagagaaataaaatgctattatggtaagccataaaatcctacctagttcctagagatgggtcaaaaattttggctcttgagttctttcatgtctaaaaggaaattggaaatgttatattagtggtttccaaatcattgcctgcatctgaatgatttagggagctttttaaaaatacagatttctgagtagtaccttcattgccatatttgatttagtaggtatagggtaagtccaggaattcatctttttttttaaggtcctcagaagattctgatgaacagtcagttttgggattcatgattattgtcagtgaaaagaaaatagattttcctcacacctttttctaaaaatatttttctattttgaactttatacagggtccctagagataagtttatgttgcacattaaatgctcccacaaataatggtgaacactaaacctgttaacagtttatagatgtagatatgtgtatgaaattgatgtaacttattgaatctctcagtctttatgtagctcttaaggaaacatcataaaaatttatggatttattttctaattggatataccaaaataattgaactattttattttaaaattgtacctttttcaaattaagattttatgacttacatgccacctttgtcaatattcctgcaaggraaagggacattttaaatttttcaaacaatattgttttgacagtttttttaaatgtacaatctcttatttatctgagttcaacctgagatcacaagagagaagaatctctaagtaaaactatagaataacttcattaatggttacatctacaaggagaggggaagaagaaatggttacattttgaaaagtattaatttcatttgactttgagctattagaagtccagattttttaatctgagtaccccattttaaaaaaagaaataaaaccttgcaaaacacaccagaatacatccagtaaaggaaaatcaaggtgaaagrtcagagaaaaaaatcagtgtctattctgtgaatggttgaaagttatagaaagacagattttcaactcagtttaagtccaaactttctaataatttgatgtagcagtgtaatgggctgcattactagtgagttccttatgtgagtgtscgagcatatgctggatgacttatctagaataatgtagaagagaattaaacattgaatgggagcttaaattagttaatttctgaggttcccttccattcttagaattctttgatttttatattgaattgagagaactagtatagtttttatttcagcaaattatagcaccattgttctcaaggcatggaaaatgtgcttttcatctttaagatactaaaccttttcactcatggcaattttttttagctagcctctaagcttggaaagcagtggaccccattaataatcctggccaactctcgtagtggaactaatatgggagaaggactgttgggagaatttaggatcttgttgaatccagtccaggtaactaaagaaaaaaactttttatattaatgttttcattttccccaaaatgcaatgattattaatgcttcaagtcactaatcacctgatcataggaaagaataataattacaaaaagatcagccatttaaatatgtggataaacaggcactcttgtgggaatataaaatggtacaacctctttagaagacatcttggcagtttcttaaaaagataaatataaatttattatatcttctagcaagtcctctactaggaatctacccaagggaagtgaaaacwtttctcacaaacatttgcatgaaaatgttcacagcagcattattcatgatagctgaaaagcataaacagcccagctgttcatcagctgatgagttgataaacaaaatgtgatgtagccctacaatggaataccatgaaatgacaaaaaggaacaaactactgatacgtatatattacaataaatgaacctcaaaaacatactaagtgaaagaaggcagatacaagggaccttatattgtatgactccacttatgtgacttgtctagaaaaggcaagtctgtagaggtagagaatagattattggttctagggctggaaatggggagtgattgcgaatggacattgagggatcttattgaagcaacaaaaatgttctaaactggatgatggtggtggttgtgcaattcagtgaacttaataaaaattattgacttgttcacttcaaatgggtgaatcttatatgtaaattatacctcagttttaaaaataaaagggatcgttaaaattgaatataattttactttgaaaaattaaccaaaaaacaaaaaaatacaaaaaaawtttaaagacaaataacccattgtgtagcaattagaagtgcaataactttgtccttccaatttgtattttttacactttcaatattatacagtttaagaaaattataaaaaatacagagaaaatcatttgcaatttctccatacaaatacatcagttctcttttttcttgttctttccattaattatctatgcatttactttacatattaacagtactataacaataatctagatacaaatttgcattctgatttttttaattttaatggtataaatatttttccttgtttcaacatagtcctcatagttacatatttaatgactaaaataattgaatggaaatagcattatttatccagtctctactgttgaaaggtaacactgkctctatgattgtactataaataatgccacagtgaatatttttatacatatttttaggcatttttgtctttcgaaatatttttctagggtcgttgacagaattatggataatcaaagttacttgcatttttatgtcattttctatgtattgcaaaattgctttccagaaatttgtgctaagttgcactggtgattttttttttaagccagtataagatatgaaacactaattaaaggtgaacttagcacattgtggtttatgtgaacaagaaggaggcaatgtggtatagtagataaactataacttttttttttttttttttgagacagagtcttgctttgttgccgaagctggagtgcaggggcatgatcttggctcactgtaacctctgcctcccaggttcaagtgattctcctacctcagcctcccgagtagctaggatcacaagcacacaacaccacactggctaatttttgtatttttagtaaagacaggatttcaccatgttggccaggctggtctcgaactcctgacgtcaagtgatccacccgccttggcctcccaaagtgctgggattataggcatgagttaccacacctagccttgtatttcagcacttaattacctggacaatcacaggcaagtgatttaaccttcctgcacctcagtttccagcccaatagaatgaggctaactcttgctttgtaaagtcagtgtggggatgagctacaatgaatataaagagtctggcagggtgcctggcatattgttaaatacatagtagccagtaatgttatttaactgtatctctactcatctagagggaaatcatcattacagatgaaggaaaatgttggataaaaataatttttctttttcttttgtttctaggtttttgatgtaactaaaactcctcctatcaaagccctacaactctgtactcttctcccatattattcagctcgagtacttgtttgtggaggggatgggactgtagggtgggtcctggatgcagttgatgacatgaagattaaggtattagtctttaagaactactacagaaggacttctaagataaatatmctatacatatatatatatatatatatgggttttgttgttgttttgttgttgttgttgttttttcttgagatacagtctcgcactgtcacccaggctggagtgcagcggcgcagacacagctaactgcaacctccatttctcaggttcaagccatcctcccacctcagcctacaaagttgctgagactataggtgtgcgctaccatgcctggctaatttttgtattttttgtagagacagggtttcaccatgttgcctgggctgctgtcaaactcctgggctcaagcgatcctcccaccttggcctcccaaagtgctgggattacatgggtgagccactatgcccaacctaatatagaatatttttgctttatattttttattatgcagatgaatattagacattgccagcttcaaatagttaaaaatgagatgttttgattaagcaattagcacaagctttagcaaaacaacatacagttgttatatttgtatccttactgttttggtcttattaaattttacaaaatattattacccagcaaatagtctgagagaaaaatctaaaacatatcttccatattctagggacaagaaaagtacattccacaagttgcagttttgcctctgggaacaggcaacgatctatccaatacattgggttggggtacaggttatgctggagaaattccagttgcgcaggttttgcgaaatgtaatggaagcagatggaattaaactagatcggtaagttacgtttccccaaaaagtagatttcttgagatttakccataattggttaacaagtgaagacttgtgtagatgaaatgtgccaygtaatttaaatgtgaaagactatactagttgtacytacacagatactggtgttttgttttattatgtaagagccgaagtaataagttacactgagtacttatccctaaatttgcatgctcatatacgtgtggttacttttgtagatggtattttaatagaaaaccctcatttatccaaacatccagagtatggggtttattgtaaaaygtgctgttttttttaacttctgttttttagatggaaagttcaagtaacaaataaaggatactacaacttaagaaaacccaaggtatgttgttagtgcctcagttgcaagtggtttcagcttcattgcacaagatacggcactctgtggtgggatacagagacctggtgcttatctcaagggagctggctgtggagcagaacagaagcttatatgcttacctcacaagctggactgtaaatgtgttatgggagagaacagggtgcaggtatgcttagttctgccctagctgagaagattcagaggaagtggtacgggagttggtccttaaaaaagcaaaggactttccaggcagagggaaaagaggtgagagagtgcaaagcatggttagcaagtagcaaataatacagagagagtagatctgtatttttaaaagatactctggagataatgtgaaaatagctcagaagcctgcactaggtagaatcaggatgaggacaatgcaaagacattttagaggtagaattaatcaatacttgacaactgattagtataaaggggagagagaaaatacatattactattagatttctggtttttataactgaatatatggaaatgactataagaaaaataccaagtttcaggtttgggtaggaagaaaatgagatagatattgggcatatcaatctaaaagttttcgtagtgttaaacaagaagttggacgtttaggcttattgctcaggaataaagacagagctagagatgcagattgaggaatctagactgggttaggaagtaaaataaactggggagggggcagggggagtagcccaagttgtgggattcacatccctatttatcagcctttgaactgaagccttatttctgataattgtttaaatgctgagaatgcataagagaatgtggggagtgagaggggaaaagagggccaagaactacatcttttctttttttttttttcttttgttgtggagacaaggtctcagtctatcactcaagctggagtacggtattgtgatgacagctcactgcagcctcgacctctgggcccaagcgatcctcccacctcagcctccgaagtagctgggaccactggcatgtgccaccatgcccagatagtttttgtttttgtttctgttttgtagagagagggtctccctatattgtccaggctggtctcgaactcctaggctcaagcaatcctcccacctcagccttccaaagtgttgggattacaggcatgagtcactgtgcccagccatgaactacatcttgcaaatagatatatttaggtgacacagattaagagaggccactaaaggagactaaagagtgtagtaagtaaataaggagaaaacagagaaagagaattacagtaggtgggtgataaacagcaaaattaaagcagactttaaagaagagcatttggggaacactgatgcatgtttctctgcttctccatctccttgccactgaaatccctctaaaatgtgcctctaaaagatcttgtataggtctttgagaaggcacaaaaccttaaggagaaagagatcacagcagtcttcagaagccaaaactaggaaggttcgcatattgaaaaaagctcaaaagtgcctacactgcagaaaaccaagaaagaaaccagtttattgagcagaaccaagcaaaggcttaggaattctatgcttacctcacaagctagactataaatgtgttatgggagagaacagggtgcaggtgtgcttagttctgccctagctgagaagattcagaggaagtgatacgggagttggtccttaaaaaaagcaaaggactttccaggcagagggaaaagagatgagagagtgcaaagcatggttagcaagtagcaaataatacagagagagtagatctgtatttttaaaagatactctggagataatgtgaaaatagcttagaagcctgcactaggtagaggcttctaccacatcactcagagagcagtagtatagagtcaccacatcactcagagagcagtagtatagagtggttctgaaaatagaaggagtgagcraaagaagctgtttgtcccctagatcacttcccctttccccaacttcacatggtcatttactaccctcctcaactcaggtagtagattggaggtttactccggaaagtttagagactctagccagctaacgccatactgaaaacagatttagtgcaaagtgagatcactggcccttttcatccactcaacttcaagaatagtggcagagaggatttctctctggggaagctaacttgcccaagataaaaattaacasgtaccaatatttgagtgtcccgtagcaaaaggaccagatttttgcactgtagtcctataatgaagcttataccctagcaagagctgcttttggatgcaaagttcacagtttgccttttatgccttactcttaaaacatgaatatatacagccaaggattggaggcacaaacaaacatttaaggaaagcctctgccatgagagagccccaaagaaacaacaagaaagaattgtaggaaacacagtccaggaagctgaaggaagtcagggagtgggactaatgttctcagagaaaaatgaaaatattaatagaacagggttctataaaaggaacattcagaaacacatacctcaaaaaaggctcttataaactaaaattcggtatcagattggaaagtacaattgaagacaccactcagaaaatacaacaaaaagcaaaggaactggacatgggggcacacacctgtagttccagcaactcaggaggctgaggcaggaagattgcttgagcccaagagttcaaggctgcggtgagctatcatcacgccactgcactccagcctgggtgacagagtgcagataagaccccatctctaaaaaaagagaaaaagaatacagtaagtaacatttaaaatttaaaaatcacaaattggcggggtgcggtggctcacgcctgtaatcccagcactctgggaggctgaggcaggtggatcacctgaggtcaggtgttcgagaccagtctggccaacatggtgaaaccccatctctaataaaaatacaaaaattagccgggtgtggtcgtgggtgcctgtaatcccagctactcgggaggctgaggcaggagaattgcttgaacccgagaggcagagggtgcagtgagccaagatcacgccactgtactctaccctgggcgacagagcaagactctgtctcaaaaaaaaaaaaatcaagaagtaatgatctgattatgttatttagaaatatagagataaataccagaagaaactacggaaagagctctgggagcaggaattataaatgaggaggagtagacagaaaactgcagtgtttcctttgaagccttgtagaactatatagcttattaaagtggattgctttgatttatttwaaaaaaaaaattgaacgtaaaaaaatagagaaagtattgagagatcctttaaaatggttcctgtgcttaaaagtatttgtcagttatcatagtgcctgaaatgccaacattaaagatgtatttctctttttgatagtagccaatctaataggtgtgaggtgatatagctcattgtggttttcatttgcaattctctgatgattagaaatgttgagcattttttcatatgcaggttgaatatcccttatccaaaaaaatgggaccagaagtatttcagatttctgatttttttggattttggaatatgtgcagaatatgtaccccttgagcatttctaatctgaaaagctgaaatccaaaatgctcccatgagcatttcctctgagtgtcatgtcagtgttcaaaaagtttgagatttggggacatttcagatttcagatgttcatattagggatgctgaacctgtgtctgttggccatttttatgtcttttgagaaatgtctcttcaagtcctttgcccattttttaataagattattggttgttattgagtaacttcagttccttctacattttggagattagttccttatcgagtgtataatttacagagattttctcccaagctgtgggttgcctcttcactctattgttttcctttgctgtgtagaatctttttagtgtgatgcaatcccttttgtctatttttacttttattgcctatgcttttgagatcatatcaaacaaatatcaaacaaataactgcccaggccaatgtcatgaagctttttccttacattttcctttagtacttttatagtttcaggttgtacatttaagtctttaatccattttgaattgattctttataatgggtgaaataagggttgattttcattgttctgcatgtggatatccagctttcccagtaccatttattgatgagactctcctttccctattgtatgttcttggcacctttgtcagaaatcagttggccatagatatgtgtatttatttggggcttttctatcctatttcattggtgagtaataacaaatgttggcaaggatgtggaaaagagagaatccttatacactattggcattgcaaattagtacaaccattttgggaaacaatatggaggtttctcaaaaaactaaaactagaattaccatatgttccagcaatcccatttatagatatatacccaaaggaattgaaatcagtatatcaaacagatgtccatgctgccatgttcattgcagcattatgtacaatagccaagatgcagaaataacctaagtgcccatcagtgaatgaatggtttttttaagtatgccatatatacacaatggaaaactattcagactttaaaaaaaaaaaaaaacaggaaaatctgtcattctcggcaacatagctgaacctagaggacattatgttaaataaataaaccagtcacagrcaaatattgtatgatgtcacttatatgtggaatctaaaaaatcaaactcaaagtcgagagtagaataatggttaccagaggctgtagagagtagtagagtagatggagaaaggggagacattggttaataggtacaaagttttagttaggaagaataagttctgctattgcacagcttggtgactatagttaataataatgcatattttcaaattgctaaaagagaggttttttgtttttgwtttttgttttttttgtgtttttttgagacggggtctcatttgaccatgcagtggcgtgatcacggctcactgcagcctagacctctagggctcaagtgatcttcacaccttagcctcattagtaactgggactacaggcacatgccaccacacccagccaattttatttttattattttcaatagagacaagatttttctgtgttgcccgggctggtctcaaactcctgggctcaagcagtccacgcccctcagcctcccaaagtgctgggattacaaatgtgaaccactgtgctcagcctaaaagagaggattttagatgttctcaccacaaataaatgataaacatttgaggtgatggatatgcaaaaaaaaatgatgtatttctcattcataccaggatgtattactattcagtaataaagcagagctgagtatttaaaaatatttatcttatcagagatcattcctccaaagaaagatggacaaagtttcacaccagttagatgattcaaataagaagacatgttcttcagccatttgctgtcaagaaataagatatgtcattaaaaataaatatactacaatcaagtagggtctgcttacctctatagaagaacatccaracaatcaaataaaagaaggaacttcatttctctatacattcaagcaagtgttttgtgcccatctggtgccaggcactgtcgtaggtgctggagtttcagtgatgaaggccttgtccttatgaagcttatattgccccactcttagtttctgaataaaggacacctaggaaactagaaaaaaaaaattcagttaaaaaataaaggcaaattaatgtacattgacatattttatttaaaataaggtgtttatgggttttttttttaaagaacaactaggattgaaaattatattttggcagtgaagggacagacatttagttccataagagatgaacgggaaaagcatgaaaagaacaagtgaccaaatttagacttaaccatcaaaaggaggaagagcgtctttgatttggaggagaaaggtgcacttgagtaaagtcagagtttttagatggcagaaagagagcatgagaattcatacctttcatacctgaggatctcacttttttcagtgaggcaagaatcaagatcatctgaacataacaaaggcaggagagctggttatcagggacttgaagagaggtaaattttgaattaaaccactagggaatacaggaaaggagtcatctaaagggttactgtgtcctattagcgattgtgtccagccatccttagaaataactttgtaacaggatcataattataagattcttaccagcaatgtccagcaacctggaaatagagcagagaaaacagtttggtttagagaagattagcaagtaaggctggccgggcgcggtggctcatgcctgtaatcgcagcactttgggaggcagaggcaggcgaatcacgaggtcaggagctcgagaccagcctggccaacatggtgaaaccccatctctactaaaaatacaaaaatattagccgagcatggtggcgggcgcctgtaatcccagctactcaggaggctgaggcaggagaattgcttgaacccgggaggcagaggttgcagagagccgagatcgcgccactgcattccagccagggcgacagtccgagactccatctcaaaaaaaaaaaaaaaaaggctaaattgagaagaggtcaagggtgtgttggaacgaaggatggtgttgagtacagtcattgaaatgattgaccttggaatccaggccgcactgggaagtaagataaattaaggtgagaccagtagcctgggttgggactaatagaagctgagagcttggaggctgtgataaatgtaaagagcaaatgtaatgggaacacaggcatgaaaagcctggaagcatcaagtagagccattctagatggtaaggtctgaggtgtagcatataaaacagaaatggaagatgagattcacatctgtagttatcagccttaaatggaagctttatttctggtaacttcactggacagtataaaatagccatgtgaaaagtaaatgcagaaagcatctccattgtcaaaagaacacaaagactaagattgacatttaattatgactcaagcttaggtggaaccatagtctgttgcttattcttaccctttctcacaggaattcacaatgaacaactatttttctgttggacctgatgctctcatggctctcaattttcatgctcatcgtgagaaggcaccatctctgttttctagcagaattcttaataaggtgtgttggataaaataacatttcctgcttatcaccgaaggtacagtaaaaatcaatagttcaattatatttagcactcctagattcagatttaactaacttacagaaatatttacctgctctgttttgtgtagggttgtcaaattagatcttttttttttttaattagatctttaaatgtgctttatcaggccaggcacagtggctcatgcctgtaatcctagcacttttgggaggcggaggcaggtggatcacttgaggtcaggagttcaagaccagcctggccaacatggtgaaaccctgtctctactaaaaatacaaatttagccaggcatggtggcaggtgtctgtaatcccagccactcgggaggctgaggtaggagaatctcttgaaaccaggaggcaaaagttgcagtgagccgagatcataccactgcactccaacttgggcaacagaatgaaactccatctcaaaaaacaaaacaaaacaactttatcaaagtattatataactctaacaaattttttaaattcaaatttgggatgttttatagcatattttgcttagatggcaactaaatggaatatatgatagtttatcttaaatggcagctaaaattggaaggaaattttaggcagaataaatttttggtgaagtcattaatggaaaagtagatttcattggtttgaaaaacctccaaaaggcagatgagataaaagagcagcctgtttgccacagctttgaactaaggtcatctctggtttctagtatagttgattccgttgatggaattttgcttaggaatttttttaataacgtttggtgattgaccaacaggatatcaaaaataaatgcctagcaattatattcctggttctgttttacaaatatttcaaattttgaaatagttcccttttattaatatagttactaaggtaataygtattactatttatacaattgataattaactcagtccttacatcaacctttttgtattcataagtgattagaaaatgtttgttagattaatacgcattactattcctaagtaatctgaagtactaggaaaaagtggaattttctaattcgaatatttttctttataaaatacaacttttttgataaattgggagaaaacaccatttagaaaaaaatcacttctaggccgcgcatggtggctcacgcctgtaatcccagcactttgagaggccaaggtgggtagatcacgaggtcaggagatggagaccatcctggccaacatggtgaaaccccatctctactaaaaatacaaaaattagccggatgtggtggtgcacgcctgtagtcccagctacttgagagactgagtcaggagaatcacttgaacccaggaggcggaggttgcagtgggccgagatcgcgcagctgcactccagcctggtgacagagcgagactccatctcaaaaaaaaaaaaaaaaaagaaaaagaaaaaatcacttctatcccacatttcccctgagaaagaggataattaaacttaaatggaatggcctgtattgtcatcttccaaaaaagaaggatgagtaatatttcatctactgtaccacagttcacctagaacttttaaactattaatagcctaagagaataaaatgtaaaatacaaatgatgccaaaagtatctgtaatatgttaaaggcatttttatttttacattgtgttttgattatagatttccattgctgctcctagtggattccaattttaccctttaaaattactagaatggaggtgttggatagggccagaggttgcacaccaaaagtatcccctttggttgcccttcttttcatcagcatctagtctaccataaggagaatgtgtgcttcaacattcttaaagggagctttgatacagcgtattttttcttattgtttacagggttagattgttttaatattatattttctgtccatttttcataggcggtttacttattctatggaaccaaagattgtttagtgcaagaatgtaaagatttgaataaaaaagttgaggtaagctattaacactttttattttttaaagttttaggtggtctctggattatgaagactttttaaacagaaatgctaaactttgttaatatattttgccagcayacatagagtatttatttgtgtgccaggcactttgctacatgctttatacacattgtccctctaaattctctccacaattctataaggtatgtattatatattcacattatgcagaaaagaaaactattttaaatgaagtaatttgcccaaattctctcatttaatgcctaaatgcacatgtaatcaagatgtgaacccagatttatgtaaatccagtctgtttaactattagggtgagtggcctccattcatacatgataaataatttacagttatctaatacagtgcctgactcaacataaagacacagaggaagtttaaatggaaagtttaattcagattatttttgtcgggtatctctcttacataccaaaataaaaatgtataaatacaaaaaaaaaaaaattagccaggcgtggtggcgggcgcctgtagtcccagctacttggaaggctgaggcaggagaatggcgtggacccgggaggcggagcttgcagtgagccaagatcgcgacgctgcattccagcctgggggacagagcaagactccgtctcaaaaaaaactaataaaaaataataaaaatgtataaatagtaaaaatagaatattaatgattgcttattgcaacagcatctctgacatcatgatatggcagtctttttttttttgagatggagtctcactctgtcatccaggctggagtgcagtggtgcgatctccgctcactgcaagctctgtctccctggttcacaccattctcctgcctcatcctcctaagcagctgggattacaggcggcccaccactacgcccggctaattttttgtatttttagtagagacggggtttcacgtgttagccaggatggtctcgatctcctgacctcgtgatctgcccgactcagcctcccaaagtgctgggattacaggcgtaagccaccgcgcccagccagatatgrcagtcttatatgtattccttgcttgattccaaaaagaatctgtaatggttaatagcaacaacagagacattaattcagagaaacctagaactgataaaataaataaaaagagatcataaacagtttgggaaaagagacaatgagcagggagtaaggagactgattatacattagtcaaggaaaaatgttgccgttaggcgtaatgtttagctcaaagtctctgggctgccatggcgtagaagtaagcaagattttctgttaaaaagagtgttatgttactttatcatattttatttttcctaggctttgatggtagagtaaagcatacaagcatataaaataaagacttttattttattgtctgacattttatttatataaaaatacaaattatttttaattatacagaaataaaataaattttatttatatacctacaaaatagtcattgtcctcgatactggaggtagacagtgataaatcccttgctctacatttacagtctagggtgaagaaagatatttaagccagtctgggcacagtggctcatgcctgtaatcccagcactttgggaggccaaagtgggaggattgcttgaggcaaggagactagcctgggcaacatagtgagactccacttttataaaaaataaaaatagctgagcatagtggcatgtacctgtggtcctagctgctcaggaggctgagggaggcagatcacttgaacccagcaggcagaggctacagtaagccatgattgtaccactgcacaccagtctgggtgacagattgagaccctgtctccaagaagaaaccaraaagatatttaaatcacattgcaatgcagtatgagaagttatataagaaaagcatgtggtcttacaggaataaataactgcaatacgtaacctaggagctacagagactagagaaagtggcagtataagcaagtctttctggaagaagtgacaagctggaatctgaaaataagtaagagttagctaagagaaggaggaggggaagattgctgtaggctaaaaacagcatctgcaaaagacccagaggcatacatggcatatttgagtgagttcaggctggagcatagctttcaggaaggaaakacaagcgctgaggctagagagatggacagaagtcaaatcacagagtgtcatatttgcctggtattggatcttgtatttcatcatgggcattgaagggttaaagtgaagccactgaagggtggtaattagaggatgacatatttgcattttttaagtgtcgatccaaccgctctgtgagggatgcataagaaagtaaagctagaggcagataggccagatagaaacattttagggaagaaatggtgaagagagagaaagacatagaaatagcatcaacagtttttagtgattaaggggatgtggagggtaaaaagtcaaagaaatcaaagataactgccaggtttctggcttaaacacctgggttgggggtgagttaacctacttaaccaggaaagagtaagtaagagttagctaagagaaggaggaggggaagatgttactctttcctggtaagtacattggggaacagggagcaaattgcagaaaagttgcttgatcaattttttacataagagtttttggtgccagtccatggacatgttttatgggcagtggatagatggatctggcccagtttactttcctgagaaggaacatccagggaagtagagtctgtggttcccaggaagcaaagggaaagaagattttaggaaaagaggaagggggtcagcaagtgtcaggtgctactgaaacagcaagttaggtaagtcctgaaaaaatcacgaggctcaacaaaaagaacattattgttgatgttgatagaagcagttctactgaagagatagaaaagggcagatgagaggccctgagtgagaggtagggagcatcttctacatgtgcatctctcatatataagcacatttatgaaaatagatgtgaattctaaatggatgtgtgtggaaattgtgtatcctgtagtcactatctatttgtatttctttaaagctagaactggatggtgagcgagtagcactgcccagcttggaaggtattatagttctgaacatcggatactggggcggtggctgcagactatgggaagggatgggggacgagacttaccctctagccaggtatgtacatttgtggtctgtttttttatgtcactattttatttaaagcaatctcttgtttatagactttaacatttttcctcaaattttcttttttgtgtatctcattagttataaatattttttaagttgatggtccaactgtgttaaaaagtaattgctctagcataactgattttttattgcatcatataatccatattttctttttccaattttaggcatgacgatggtctgctggaagtcgttggagtatatgggtctttccactgtgctcagattcaagtaaaactggctaatccttttcgaataggacaggcacatacagtgagggtaggtgaaatatagctgtaacaggctaatttgtcccaatccaattctaagctgttgatatgtaaaatatacatgctatacttttctttaaacagtggtttacggctcatgcagctggtcactgwacactagcggctagagtgggatgaggaagaaacagaaacatggctcaagatccatgagataaaacgttcacttgaaaaaagaattccttaatcaatgaataaaaacatattcagattaatattttctaaaaatgaaatgcataagggttaagggattgtggatggtattattaaggaagacctttctaaatttggggggactgacttttaaacattatttgttccctaatatcagctgattttgaagtgctccatgatgccaatgcaggtggatggggagccttgggcccaagggccctgcactgtcaccataactcacaagacacatgcaatgatgttatatttctctggagaacaaacagatgatgacatctctagtacttcggatcaagaagatataaaggcgactgaatagatggatgagggagtgaaaactttgcatagaatcctcacgcaagtagatacatgttcatccaaaagtattaatagaaattctctatcagctattcagtcttaatttcactagtagtataatgggtatacatttttgtaaatagcatccccaaaccagccagccttcagttatttacaaatgtttgttcttttttcagcaaaatacttcaaatgaatagtattaacttacaaaaagtcacgaaaacttacatgagagtgaaaatttgttatgactgttttgagagtgggactcactctgaagtatgtgctgtctcatgtcttatttttgaaccatgcatatgatggacacacaatggatggacacattatatctccaacaaggtgtgggtggaaagatcaaattaacctgcttttttgaaaggaaatgattactgtcaaaccagcatggttaattgtgagcatcctcctgcagcatgccccttaagattttctacaacccaaaccaagtgtatgtattgatttctaggaacccccaaaaggagaatagtaaaaaaagatcatacttaaaatttgtattacaatttttattttaggaacttattcagacacgtaaatgttgtttaattctgtaggtaaccatttgagctgcaattcaggatcttttttataacaccagtgtagccaaaagagaaacagataagtgaattggtaagaaataagattcagagcacttgggattgtaagttataggttctgagctgaacagtttatcagccgctctttttattaaaagacagtgtcaacacttcaaaaaacgtgcttaaaggagacaacggtgagattaattgcttagaaaaagctcaaggctgactgataagttttaaaaatttggtggtcttgtagtattttgaaatacagtagtcttttaacagaatttccccttagggaggtaagtggacagaaatctttgctaaaatgtttatatcatatttattttaaaatgagagagatatatttttaaattatttattatttaccttgtggtatggtacctgtgtttagtgtttacgttctgtagctttatttaataagttaaattgatcacataaattctgctagtcacaatcagatagaaatttagtctattaattaaaattctaatttaattctcctgacagaaatctagatattcttattcttcacaaatattcctcattgtattgaaaaatgaaggagggcatgaaaagcactagggaactacttttggataactgaaagctttgtttcattgttttatttgcccctcaattgccacaaacttactgaagggctagtttcatggttcccattagagggtgcttgtttgctgctgttgaccagcccaagggtcgtgacccacaggtcggctgacccagagggcatccagcctggtgtttttctgacacatggcccaggctttgtggtctttcatgacattaatctctgaaagatcagaatgtatcccccaaaataccattagctatctttgagggtctattatgaatctgtcatccatgaattgccataaacctaagtttgcctcacctcaggcccagaccatgttttcaaagagcaacttagtaatgtatacagtagtcagtacattttatgaaatactctattttgctaaattaacctcttgcagatctcctcaggtgatcttaaattctagtcttgagaaactttgtgagcagatctgttttcagcttctttatatacctttcatggtaagtaaccatggcagtgaggatggcagagttttgtttttttttttttaatgggccaatcatgttctgagtattatgaagtttatcctttcattcatgatcaaaattgttaaagacatcacattttataaatacactgttaaatccactttgctgtaggttatagtttacctgttatataattcgtagtgctaattgtagtagaagcaaatcaatttaggatgttggaacgaaaataatcacaataactaatacagctttttaattgtgaaaactacaattaaaaattataattttaataccaaccataatattacactgtatttagaacaggcttatgtaaaatgccctcatttatctaaataagttgattttttggttattgtaatctagtaaggtttttgcatcactactggtctgtcatgaagtttttctgctggcttattcacttatttagacttcatttagggaagctatttcagaataccatctcataaaatgtatcattatcttgtttttgcaaaattcacttactttttgggcacatttacccagcatttcaaataagtgtataggcatgtgccttgtttaagtacaatttataagacttcatgtttgcaagttacatattagggtagtgattgtttatattaccagggattctacactttaccaaaaaaaattgccataagattttcctgttccattttaaattgtcttgatatttaaaaaaataacttctacattctcaggaagaaatacatgaagtaaatcatatctccatgtctgtttccagatttctctcatctttttactatcccaatacattcctaattcctataaacgtagtggcttaaatactgaatacctggcagctcttaaagatcccttaggcagatgatgataattttcagtgtttcgtcatgtttaatagaaatcaaactgacttgtgttttaaaatacaagttgtctgctagtaaagttacatgatttaggtgtgttttaggttttctgcaacaattagctgtgaacccctaatgtagctaagtttatacaaattttataatcaaaattatttatttttatttttttagagtatgtcaaaaacatatagtgtttgctttgtgaaatacatttgcttagagttataaaatatactgtgactcagaaattgtaaagtcagtttgcgttgtaaaaatgaatactaccagcatgtcaaaagaaaaataatttacatttgtaatataaagtaaaattgtatttaatatatttattgaattttaaatttgcactaacttgaaaactttaaaggttatactaatttaatgattaatgtggacccaaatacataatttggccaaaaaagtcattagaatgggtaatggttttgtgtggttttccttcaaaatgataatattgaagcaagaaccagcattttatattgataatttttttaatatttctacccagttgaggacagtggaatataagtagatatatttaaaatatctagatatttaaaaagaaagaaaaggttgtttatcccaatctgaattcattctcagcaacaagacagaaaaggtggtttgggttttgcttttaaacagtgtccccctgtctttttcaatttttcccttgaagcctttctcttgttcttcagagtacgcgctgcaggctatctgcagcatcagaatgcctgggcaggctgttgaaagtatggattcctgagcccaacccttaacttaatgattccctgtctctggagatgcaacatagaaatctctgtttttattaacaagcgcctcaggcgattcttaagcatactgaaatttgaaagcttctggtctgaacctcatgtattcacctagggcttttgctaggtgggataccatgccgaaaaattgaattaattgtatgttcttaaaattgtttttcttctactccactgtcctcttccctcaaaatcacttttctaaaagaactctatgaaaaacttatttgtatcatacccaaattgatatatttgtctgaactctgttacataaaaattggtatgattcatacgtggaatcagtttttggactgtgacccatgcagtgttgggggacaaggagttgcttcaggagttagtgcagtgcgcctccaaggggcagtgagccatggaggcacctgccttctcactgcagtcaatgcagccacacttgtgtatactgagtgctgcttcagatctcagtagataaaataattccacatttaaaatgattctgctattttttataaagggtttgaaagccactactataatgactttgtcacctaattgattttctactaatttttacatattcagaaacttcgtgtttttttggtggacagaatattttggaggtctccgtcgctgtttagaatgtggccacttggctgtttcacagtttttaaagctattttattgaatagtaaagcagtgaacttagcctttgttctttgtgtttctaatttaagcatatagtctatttaatttttgatatgtaaatacacatcaatacatatatatttacccatgtggccctgtgtagtcagtgcatgaggcttgcatagcccagaaaggtacattccagggttctggggaaagaattttaaaatgccatcctctaatacagacgtttataaaacttaaatgaaatgattgggcttaaccatatgcaagaaagtctgcagaaaataaatcacctagaaactataaatagaaatgtgctgctgaggctgggcacggtggctcacacctgtaatcccagcacttggggggctaagggaggcgtatcacctgaggtcaggagtttgagacaagcctggtcaacatggtgaaacgccgtctctactaaaaatacaaaaaaaattagccaggtacattggcacatgcctttaatcccagctaatcaggaggctgaggcacgagaattgctcgaacccaggcggcagagcttgcagtgagcggagatcacatgactgcactccagcctgggcaacagagcaagactccatctcaaaaaaaaaaaggccgggcgtggtggctcacgcctgtaatcccagcactttgggaggctgaggcaggtggatcacgaggtcaggagatcgagactatcctggctaacacggtgacaccccgcctctactaaaaatccaaaaatttagccgggcatggtggcgggcacctgtagtcccagctactcgggaggctgaggcaggagaatggcgtgaacccgggaggcggagcttgcagggaggcggagcttgcagcgagccgagatagtgccactgcagtggggcctgggccaaagagtgagactccatctcaaaaaaaaaaaaaaagaaagaaatgtgttgctggtatcagatatcagaccaagaacacttcagtctctctaaggatgccctgagctacctcactgttaaaggacgacatcaacacagaatgcactaaacaggaaataagctgtaatctagagaatttccattatgtgttactttttggtgactaacatggaatgttgaaaaggaagagctggaaagctcagttgttttccttgttcctctgacattgtccaggcaagagggcatcctgatcagatgagtagatttggctgagaaaaaccctagagtaaggcaggcactttgtggaggtggatgatgatggctcataaaaacgtttgttctcagtccagttcagggctctgccagcagtctttcagatttgaactgcttaaacaaaccctacagataaattggcactctgatttgtaattctgtttgtacaagtttagagcagcctagctcgagtcctcaaccccagtcctcttagaagtgaactgattgcactggatccctaaacccacaatgttgaggacacatgtgatgactccacttgctcagccagctggcctcttgcactttcccctgcccaccacttgtaactaccacttaattatcttgtgttaattgcttttgttgtgttgggtctgtatttttgtggtcagtgcctgcaggcagaaatgtgaaagcatttggtatgttgaagatacttgcttcttttttaataaaattaaaagtgcagcacgtaagtatgatactgtgtagttttttgacacaaccatgagatacaataagcagctttgacttagtgtcccaaaaagtggttcttggtctacagcagggcaaacatatatgtggcaagttctgatcacatacttttagacagaaagaataaaaaattcatatcgcatggcttttgtagcctaagagcacagaatcatacacgtgtgttaggagaaacattcattctcacgcatataaactggctcctggcagagtagagcagtaagtgggatcaaaggtgaattcaccttattttcagttggtagagtatggaaaaatgtatcacttatttgaaatacctgaatggaaacccagcctctactactgtaacttaacactgggcagttacttgttcttcctgagcctcaaattttctttctctgtaagaatgggaattaatgcccacctacgggttgcaagtgcttacaggagctgggcaagcaacgaaggtaagagttgtagagacttcggtaaactggagcacatgattcctgggaagcaggcctagtgtaaacaatttatttttctagaaaagacagaagtttagagtatatgaaatctaatttttaagtattggttggcaactaattgactatcgtctaccataaggttatatgataattattagggcaggagagtgaatgcatcttaatatgcatggcagaactgtgtgtttccttccatctggattttcataaagctttctgatttatcagtaacgatctgaaaaatgtactgtggcatgtaacatcttttattcattttattaggcattagaggaagaatattctgtagtcctgctttattctgccatctttacctggaaatccatttttataaaatttttgtaataaaaattcacttgatcacttgcctgctttcttttaaacagtgccaagcgtaatgccccttgataatttacatatatgtgaacgtggctgtgatagctgctgatgttcacacataggccatcttacatgtaatgattccatgtttggacttaaacagcttcacacatttattgtacagttaggtgtcacatgcttttactttttattttataatctgtatttctgtgaggtagacattattggctccatgttatatacattgatagcccgt

SEQ ID NO: 95543 - DNA, 56207 bp, Homo sapiens
cttagcttatgtccttaggtctgtattcacttataccaaatttttagggattcttcttgaactcttctctaagccctgttttgtaaacaacaacttggctgtgtgtttgttacctttgcacttacacagaaatgtgtgtgtgtgtgtttgtcttatttctcaaaggatttgagacaagctagggaaatacataaatttgcaaaaggataaaataagaatcccagaacccaggaacataagggaaggagaatattaaagtagatactgcgtgaatcagttgcttgatgtgggggctgcaaatttggctccaagcttcataactggccaaggtaaagaaagaaacaccatcctaagattcacatggtccaacagtcctggataagctgctttctatggggaagtacagctttcctggatactgaagcctgcaagaaatctctccctggatccccataaaatgacattgggaaatgtgtttgatgatattaaaaataccttacaagtttcacaggatgtttttccaaatcatgccctaatgcaggctgatggcttaatactaaagggtaatttagttaatgcaaggctaggaggagcccaacccttattctcaacttcaatcaatctcctccatcagaatgaggatttcttaattctattctgacgtgcttagggcttccatctagggtagcaatattaaatcaattcacttaaattagaaatactaaaatttcaagcagcagtttcttggaatttaaatgagataacaaaaggtaaggaaagcaagcttagcatagtacctggcatggagtaggagataagagattgtaagtttccatcagtccctttgtatgaggcactgtgctgacttccccagagaaaatgatgagtttgacaactcgacatggtgaaaagaccacaactttggagtcaggaaaacacagctctgtcacagagcttgttacccgaggtctggcagcctctgttttctcttctgtaaaatgaggataataaccagtgaataaataactagaaacattacatactcacccttagcttagtgcctggagcatagtagggacttaatacattaagctgctttcttacttttaaaatcatgcaatcgagcaacgcgtaggaactaaaaaagaccacaaacccaatgacattgagcacttcacaacgtatagatcacctgcagccttatccttccaaatccaaaggaaatctctttatctttttgaaaatcagtcactccctagcaattctcttggctaaataatcaatacttttagccctttctcacctatcaagcattagtattattacttcctgtcccattttgttttctctgctctccttcaagatatgggacttcaaactgggtgtttccgtgagagaaagagtgacctgcctttattaggaatgattgtgaatttggggaggatactatagatgatggttcatttactcaacagttattttgaaagtgcttcctatgtgccagacactgtgtttgtgcaaggttgatgggattgcagcttcgtttaagccttttcctttaagtatttaaggcttttcttttaagaccaggtgagtacaggaaagctcaggggctctgccattctaggagaaaggcagtgaactatacaggtgcctccattgtggacaagcagactggtggttaatggccatgacatcctttggaaacactgatgatgctcggagtctctaagttctctcacagagccctccaaggttctacctgtgctaaagtctcaagggcagggtcatgaatccatttgagaagctaacaaaatctatgaatcttcttaacagaaaaagacccatgctacattttcttcacaatttcaggatgttcaaagatccccctgaagttcctcttgtggccacccccccaccgccccccagcagagtgccagagtgagacgcttttgtttgagtgacgtgtctcaagtcctgccatggaccttgacattcggtcattttcatcaatgaattgggttacgaagacaataaagacgggtcaaccaaatgtgtagttaggacaaaggcaggaatgagagaaatcccattgcttatcacacccatttaatatgacaacattggacagaggcaaaataaaccctttcatttacaccctgttaggagctgaactgcatcctccccaaaattcctacattcaattcccaacttgcagcacccaagaatataactgtatttggcaatagggcctttacagaggagattaagttaaaaatgaagtcgtcaggatgggcctcaatctgaccagtgttcgtataaaaaaaggaaatttagacacatgagaaggcaccagaagtgcatgtgcagagaggaaagaccatggcatggggcagcaatagggaagctctctgcaagccgaggacagaggccttgacagacgaatccaaccctgcccatgccttgctcatgaactttcagcctctggaactgtgggaaagtacatttctgttgtttaagccatctactctatggcattttgttatggaagccaaagcaaactaatacagacctcaaaaggcaattccatacgaatagaagagcagatggggatatgagaggcatctgactttaaggcagccttgtgaaagctatatgaaaatgacataaggctttaagttgatttcaaatgcagtaaaaataaaatacttcttgactctccctaaaggggccatcctcacagaacccctgtctttgagagcagctgtcttgcccgcggacttgctttttgccaatggggtgggagcagacgtgagtaaggtggacctcttccaagtagtggcccatcactgacctctactttgacgcaaaattagcagaatgaaaggaatgaaaagatgctgtttccccctgggtcctggagtgaacacagtgtacagcacagtcacagctgacatgtggtggatgtgcagctgcataagaaataaacatttcttttataagccaaataacattttgaggtcttaactgcagcgtgagttagcctgagtggatgtagacaaaattgatgaggtgatgtgactgtctagcaaagcttacaaggtaattctttttcggttatctttgcttagatcgtagcaggaacattgaattaagttatgggaaacctgcattcagaggtcaaatcgtgaactgtgttgtccgtaaaaaagaccatgctgatggggagatttaaaactaagtcatatgggccgggcacggtggctcacacctgtaaactcccagcactttgggaggccgaggtgggaggatcacctgaggtcaggagtttgagaccggcctggccaacatggtgaaacttcgtctctactgaaaatacaaaaattagccagatgtggtggtgggtgcctgtagtcccaggtactcgagaggcagaggtaggagaattgcttaaactgggaggtggagattgcagtgagccaagattgcaccactgcactccagcctgggttacacagtgagactctgtctcaaaaacaaaaaacaaactaagtcatatgaaagaaaatgaaaaggaatggagaatatttagtctggaaaaaaaaaaaagggagaaacgcctgtgggaaatggactgtacccggtctatggagcctgactgggttaccaaaggcttttgatgaaagaattggggaaggaaatttttatttaacatttatgtttaaatttacatttaaattatacttactgttaaaaacttttttttgtttatttatttgagacagggtctcactcctttctgcaggctggagtgcagtggtgcaatcacggctcacttgtagcctcaacctcctggactcaagaaatcctcctgcctcagcctccctactagatgggactacaggtgcatgtcaccatgcccagctaatttttgtatatttagtagagatggggtttcaccatgttgcccaggctgatctcagactcctgggctcacgtgatctgcctgccttggcctcccaaaatgttgggattacaaggcatgagccactgtgccaggccaaaaacttattgaaaaggaagaatttcctcacccttagaactgttcctgaaatgttgtgagaacctcctcactagtgatattttgttggaaatactgaggggggagttcatgggttgtagtgatgttgggttggtggttttcaaacatttgcagcagtttaataaaacctaatatgaaacccccaatataatagtggtcattataagcctaagtgttttatatattcaaaataaaagcatttaatttgtataaagccagtcactataataatgaggcccttttgatgaacatacagttttgaattgggaatatttattcatcaactatttatcaagtagtctctatttgccaaatactgttgcacatgttggaaaaacacagcagagttaaggagcttatagtccagtagatgagacagtctttcagccacctaaccaataagtcagataactttagatggtgataagtgctatgaagaaaataaaataaggtaatgtggtagagagaaggtggctggctgtagacgtgttaaaatatcatggaaggcctctctgagaagctgagggctctgagcaagattattccagacagagggaatggcaagacaaaggccaaggtggaaatgaatgggggcatgtttgaataatagtgattgcaatagtctgccatccagaagaagagattgagaggcaggcgagggaaaaatcatggaggatcttttaagctagttctcaaactatccatggtaaatgattaaaaaagaaaaatgttccagccacagactaacacgtgatccaactgcacatgactcattgcattcagcctgtgctccgtgatcatcaccatgcacgtttggcaacctcacagccggactctcccctcttgaatgaaactactgatcgtatgcctgaatgttatcccaatgtcaaattgctatgaaaatttcccagtgttgactctcaatttctattcttattgttcttaacttgatgtaaaccaggaacacaccattcacggatctgttggccacactttgagtagcacatgcaaagcacctcggattttacttgaagtgcattggaaagcacacatggggaggtgggaaagagaagactcaaagatcacttgtagggttgtggtgatgctgctctttgtggagatggagaagaccaatggagaacacatttgggaggagagagcaaaagttctcaacttgggtgagaaatatctaaaccttcaagtagagaggtccagtaggaagttagataatatgagtctggggctcacaactgaggtcaaagtcagagttgtaattttggaaagtcatgatagcctgcatttaaggcctcagactagctgagttatctagcaagtgtggaaatgaaagaaaagagatcctaggacttcgacctggggcattctgacataagaattattgactccatcagttttaacatccaagaaattttatcttaacatttatggagccccaaggcttcacaaaaacctggaataaaattcccaagtgtcacaatgctggcatgaagtggcagtcaataaatatacatggaatgaatgaatgagctccaaaataaaggtttcaaaaacccctgagattttgcgattttagaaccccaagtttcttcccacccatgatgtgttaggttgaatggtgacttccccaaaagatatgtccatgtctcagaacctgtgaatgtgactttgtctggaaaaaagagtcttctttgcagatgtaattgagtgaagaatcttgagatgagatcatcctggattatctgagtgggctctacatccaataagtgtccttataagaaacagacatggaggaaaaacacagacagatggggagaaggccatggggctgtggcagacattggagctgcggtttcaagccaaggattgacagcagctgccagaagcttgaaaaggcaaggaggattctagcctagagtctccagggagagtgcagccgcctggctgacacacgccagtcctgccaacaccttcattttagacttctggccttcagaacagtgagaaaatagatttctgttgttttcagtcatccagtttgtggtcatttgttacagaagcctcaggaaactattgcacatggtctcttttagctgatgctgatgcaatatttcctttggagctctgctgtattctgattcagtgattctcaactctggctgagcattagaattgcctagatgttttctaacaaaggttggttggtgtctggaacatcctcagagattctgattcagtagggctgtggtacaggctgatattggtgtagagtcagacataagaattgccatttaattagtcacaacaacttaacatcaaggggtggcacagaggtacagggggtgggaatacctatataattgtttcaccttaggaatttgctttgaaacataacaatatgtgtctttacattcaagtatattcttagaaactagctgaagccgtttcgcatccttgtggcactaagtcctgtttccactgtgaaacagttaccaagacagtcctgtttccactgtgaaaaaataaatggatgttctgacaggtggccaccattgctgacctgaccattctccagaagcaccaggaggcattgctttctagactgaagctcagtcatgcttcactttagtctaatcaaaaagatttgcttgcaagccttcattccaaatggttccagtgccttccatacaatcagataatgacaattgtgagtttctggtggcatgctacttcatgtaattaaaaaaaaattgctgcgtagatgtgctgaataggagaagagtaagttattatttggagggaagaggattcccaattgtggaacaaagcaattccttgtaccctggttctacataaatgtttctttatttttgaagttgcatgaccccctgttgtggtcttttttgcacacatgtcagaaagcagccatgagtgcattgtagttggcaatgtgagcttctgtgtaaagggtctttgacgaagagctcactgcatctactgactccccaggatgtctgaggtcacaagtttggctggagcacatgagcccagataaagaagatggttttgccctcctgaaataaagccagaagtgatctcctttattgtgcactttgggtcatgygctaatgatgagggtttctgtaatactaatccccctaatgaaggcttctcccagcccttacacaagcccccaaggccccgtggcttggcaagccagagagaataaaagcagcacggtgtttggcttttgaactgagttcaaggcaattaaagtcaagagctaaggagggagggagagggtttagaaataccagcataataagtagtatgactgggtgctctgtaaattaactcaattagacaamgcctgacttaacgggggaagatggtgagaagcgctaccctcattaaatttggttgttagaggcgcttctaaggaaattaagtctgttagttgtttgaatcacataaaattgtgtgtgcacgttcatgtacacatgtgcacacatgtaacctctgtgattcttgtgggtatttttttaagaagaaaggaatagaaagcaaagaaaaataaaaaatactgaaaagaaaagactgaaagagtagaagataaggagaaaagtrcgacagagacaaggaaagtaagagagagagagagctctcccaattataaagccatgagccccctttggtgggggtttctgctcagttgcttgggctgcaaaatcctgccaggagcccagggtcagttcccccgagtctgcatgacggtggacagcctagtgaacaaggagtgctgcccacgcctgggtgcagagtcggccaatgtctgtggctctcagcaaggccgggggcagtgcacagaggtgcgagccgacacaaggccctggagtggtccctacatcctacgaaaccaggatgaccgtgagctgtggccaagaaaattcttccaccggacctgcaagtgcacaggtgaggcccatgctccaagcttggtggggagggccagagctggggaaagagctccttctaaggaagagatgagactcttgacagagactcttagattaggctttgaaaggcaaaccaatgatggttttggtcrgaagcatattcaataaggctgatgtgctggtttattcttcacaccctctagtacatctagttatgaagactaaataaatatggcgtgggccaagcctgcttatatgaatgcatgccaacatactattggcttgtttgttggaaggggaatttaagagcttaaaagcgtcagctttgaaactcggagcaagtcctttcaagatggattcggtgccctctcctgaaatgggtttgcacttgttgaaaagggatgggtgaagcttggcattcggaagacaggagtcaaaggcaggtgttctggtctcagcatttctcatgatttgaacagatctctctctctctcttttttttggagatggagtctcgctttgtcaccgtggctggagtgcaatggtgctatctcagctcactgcaacctccatctcccgggttcaagtgattctcctgcctcagcctcccaagtagctgggattacaggcacccgccatcatgcctggctaatttttgtatttcgagacggggtttcaccatgttggccaagctggtcccgaactcctgacctcagcagggtgcatgtttctcattaaagcttatgaccaggttgtaactttgacaaaattgtcgagacgtggcaagacagagctttctcgaggagctgggggtggggggggcgggcggggggttgttattagataacaatggctttttgtcactcttctctggacttgaaccggacatcacaaaatttgctcagtgtccttcctttagactctggtctctctcattacctgttgctttgacatctctgtgcatttctcattcctctagctctttggggctttttcaaatcctcttcaatctttcccacctccagtttccagcagccatatgcccttcgggaataaacactcaaagcctggcagggggccactgaaatacaaaaaacacaagtggcaacctcaggaaagcccttggacactgttgtaggctgggtggttgcagaagactttttccttttaaaaatactttttacttctcttctcataggatgctggaacataggaggatataggtcattgagcttcataaggggttgaataggtattactaagggaacatacaaaggcctgtgatgttggtgtaggaatgacattcgattttttttttttaattttaactttcaactttattttagatcctggggatacaagtgcaggtttgtgacatagatatattgcacagtgctagggtttgagatatgattgatcctgtcacccaggtagtgtgcgaagcacccagtgggtagtttttcaacctttgacccctccctccctcccctctctagcagtccccagtgcctattgttgccatctttatgtccatgagtgcccagacattagatttcttttttcacattaagagttctggctttaggcctggtgcagtggctcacgcctgtaatcccagcactttggaaggctgaagtgggtgggtcactttgaggtcaggagtttgagaccagcctggccaacatggtgaaaccttgtctctactaaaaatacaaaaattatctgggtgtggtggcaggcacctgtaatcccagctactctgggggctgagacaggagaatctcttgaacccaggaggcagaggttgcagtgagcagaaatcacaccactgcactccagcctgggtgacagagtgagatctgtctcaaaaaaataaataaataaataaatagttctggctttataatcattttgtagtaatatttttaattctgtcattcagaagaatatctaggtcctggttttgccctgggtattaatcatgacaaaaatttcaataacatattggatatatattatccagcttttctaagttttttaagcatttgcttctatagaccttctctcaaaattatcatggtkttttagacgaatgaggagcaggttgctggtgtggttagcgtgattgaaaaccacactaacacagtaacttctttgttcaaaaccccaaaatacttctagaacaattatttctatgtcaatcaatgaaaaagtgctggccaagcgcagtggctcacgcctttgggagccaagcactttgggaggccaagacgggtcaggagttcaacaccagcctagccaacatggtgaaaccctgtctctactaaaaatacaaaaattagcgaggtgtggtgatgggcacctgtaatcccagctacttgggaggctgagacaggagaatcacttgaacccaggaggtggaggttgcagtgagctgaaatcgcgccactgcacgcagcctgggcaacaatagagtgagactgtgtctcagaaaaaaaaaaaaaaaaaaaagaaagtgccaacactttcaaaaagttgtaaatctgcattgcatagaatcctgaggcagaggactttaggaagtcacatataaccataaactctttttgttaccagcttcttcatatttttgccatggctagcaagttttgttttgttttaggtagggatagaaagaatagaagggatcattgctatttccctttggtaaggaaatgtttataaatattgctctagaagtaataggaacttaggatcatggagacctaccttcaaaaaaaaaaaaaaaaaaaaaaaaaaagaggctccccctgctctaaaaagcccttgggccagaaataaatagggcctgttctttaagtccaggctgtaaggaagtcccatgtacataagccagtccaaagaagcagggcttcctccagggagatggtctgcctctccagccattgtcaaggcccggcctggccctgaggccccatctccaggctgtggctcacctccccccgtgatctgctcagtccaaactcatcaggaacagaactctttccacacctacatttttttaaaggtaacttaagatttactgtatctataagttcaatttactagacttttaatgtttcccagttttattgaggcataattgttacacagaacactgcacataattaacgtgcacaatatggtgtttggacatacctatacagttgtgttgccatttccacaatcaagataatgaacatattcatcatctccaaaggttcctcgtggttctttgtttttgtttattttttgcttttgtggtaagaacagttaacatgagatctgccctcttaacacatttttaagtgccgaatgccttattgttaactataggcactatattgtacagaaaatctctggaacttgctcatcttgtatcattataactttacaactccctatcgcccctcccccatcccctggtaaccacaattccgtcgtgtacttctctatgttcagctactttagatgcctcatataagaataatcatgcagagtttgtccttctgagactgacttatttcacttagcacaaatgtcttccaggtccatccatgctgtcgcaaatggtagaatttttttctttttaaaggctgaataatattccattgtattgtcataccaactttggatggctctacttatcttgctagatggtctttttctttgaatctcagggcacgagactaagtccttagtgactgagctgggaagttattttgtgtatgtcataattaccattctgtgatgagccgtgtgtcccaaagcaggacacatgtccttcaattaattattccccaaagagtaagttgctagccttcctagggtagcttttttatggtttgtggggcaatctttggaattgaaacctgatcctgagcctcccagagaacatcctctacagtagcctgatgactcttttgcgaatggagtcactggggcactcctgggatgatccaaaatttctcaaggaagagatgtagattagtgtcttgtaacagactattgatgaccccaaatgttgttaattctttggaaaataaacacctcatagtttccataatcatgaagctggtaaagtaatttcagcctaataagtagaaacacatagaaattctgggatttgttttttaaaactctaaattctatggtgaaattctctgtagagagcttctctatagtctctgtagggataaattgaaacaaaaaagccactgagcttaattgtcaggaagarctgaattgcaggagactttgaatttgctattcaccttataaggcttacctgccagttggctttatgagaatatgccatttgcagctatgtcttttggcttctgaaaaacttgcgcaccaaatagtttttgaacagttgacggtgaacttcttgtttgtacaagtgactaattgcctccattttccaatctctgaaatggggataatgatgaaaccacacttgtaaaatccttttgatttctgtagatgaaaggacctatgtaagtataaagtattgttattaaaataatagaatctctaattaaaaggaataggctatttagagttccttgtaaattcactaatcggtggtctttaagcttatttagtctaatggctttctgaggttgagctgatgcagttcatktaggaatgtgtggtgtttagatgatctcactcttttttccatttttatcatagtcctttgtaaacatgagactttgactctttaaatttaattttcactgaaggacatactcaatggtcgatagattgatattatctaggaatcattttttttcctctctccatttcccagtaagataacacggttctttctaaaacrcttctcttcttatattttttgcattggtagattaagaagaaaaaactaaatcatgttaaattgatggaagatgctattaggaaaactaaattaaagaaataaacattttgtctgctaggctttcatgttgttacacttttcagtcatctccagcatttcaacaaattcttcaggtcaggtctataaacttagaaatgaaagggacctgactgcagagctttggaataatttctctgagacatcttggaaaaggaattttttaattgaataaatttctgggtcataaatgggctccaaaacagacacaagctttctttacccccccacttcccattcttttcacagatgttgaaagctttcttattagaacttatacattgccttttggaggcaactctggttacattaaagtttcttgttcactgtagttgtgaagcatctctgattttctgaatcaggattaatcatttcgtcatttgtcatccagtggagcttgacttattcctctgttttcacttttcccacagtttgacttgtgttgaaatgtcattgtgtacttgtccttcatttccactagactaaggtattattgcctcatttatacagatgctccctgacttatgatggggttacatcccaataatccatcataagttgaaaatactgttaagtcaaaaatgcatttaatacacctaatctatgaacatcacagcttagcataacctaccttaaatgcactcagaacactaacattagcctacagttgggacaaagcatctcacacaaggcctattttataataaggtattgaatatctcatgtaatttactaaatactgtactgaaggtgaaaaccaaaatagtcatatggatattcgaagtagagtttctactgaatgcatattgattttgcaccatcctaaagttgaaaaattttaagttgaaccatcataagtcagaggccatctgtatttgtattcactagtgtctgatcccttttattcaattattcattgattctttcaccacccatccaagcaacatttatttagcatcaactaggcccttcagatacagagagggggaaaaactgacgtgattcttaagatgtgcacagtatagtcatatgtaagacagatatgaagacaaacaattgctatactatttgataagtggtctctaataatactagtaataataacacaatatagaactcacggcagggtgcggtggctcatgcctgtaatcccaacactttgggaggccaaggcaggtggatcacccgagttcaggagttcaagatcagcctgcccaacatggtgaaaccccatctctactaaaaatacaaaaattggccaggtgtggtggtgtgcacctgtaatcccagctactagggaggctgaggcaggagaatcgcttgaaccggggaggtggttgttgcagggagctgagatcacgtcactgcactccagcctgggtgacagagtgagactgtcttgacaaaaaaaaaaaaaaaaaaaaaaaaaaaaaatatatatatatatatatatgtatgtatatatttaactcactgtataccagatgtagttctatgtgctccacattaatgtgcttgttttttataacataaaagctatggtagcataaaggaagatgtgttgattgttgtattttttaatagactttagagcagttttaggttcacagcaaaactgagtcaaaagtacagagagttgccaaccccctgccctcacacactcacatctccctcactgtcagtgcatgtttagtgttggctaccttttagatagtagctgttcaataaattgtttgttaaataaatacatgagagagccaattattttgtttctgccaactacaaagaatcatggcaaagaaaataagagtagtcttcaaattcatggcataagttatgaatgactcagtttcaacagtcaggcccccaattcaaaaacaagtgttatgcctttaaatgtaaaaaggtattaaattattattataaattttaggtgtgttatttattaatatttttaaatattgagactttattattttagatcagttttggattcacattgaaattggggagaaagtacaaaaaattcccatctaccttctcccccacactctgcaatcttccactagcaacatccgcaaaccagggttacaatcaatgaacctctaccgacattattatcatccaaatttctcagcattatgaagcaaggaattactcttctactgcagagaagtgactagacatttacctccaatcagctatagataggcagctggaaatttgactgaattttaatctgggtagctactcttctttagacacagcattttgttcactcagttctcaaaacagtgttccattcctrtactgtcatagtaggtgatatgttttaatcaaatctgtttttaatacatacagttttagtaaggttgccccagggaaaatagacttcaaggtccataaaacgaagcatcttgcatagcatctgatgagatagtagccgcttcataaatatttgttaaataaatagtttgtatttaattatctccaggaatcaatgtacattttaatgtttaacttaaactattcaaaaacattgttagtcttgggaagagtagaatttttccttttttcaatattttaacttatgttctcatagagtgctgtaaaagaaaaatacagataattgagctacgtaaaaggtgggatatatgatatattataaaaaacaaaaaaactcaaccgattacaattagaaaaaattctccctacttacattttaaggaaattttctttaactatcagaaaatccactgtagaaaaggaagcctgtgcattttctttacagaatgctgttaatcattttgttttcatgctgttggaaaattttcctttccttgagagatccaaataactccccctcccctatggtcatagtactttttacttacctctattttgctacttgtagtttaccaaaattatttataggggctgctttttctgcaaacccacagaacagggagagaaaatgtatgtggcatcatctgctacatgctcgatacttctgttattcactcaacacacatttgttttgaacaaggctaagcacaggcctaggcagtgagttcacagccttacagctgcctggagctgaaacaagtgtagtaatgtttacaatcagtgtaaataaatgtgaagaaaggggatgtatgaggtgcaaggaagtaactgacccgaaccccgacctttggaatcaagaatgaccttagagagcacaaacgtgaagcttaaaggagaaatggatcacgcaggtaaagaggaatttagggagacagtgagggaaaagtgtttcaggaagaaggaaaagcaagcaaataggcctagggcatgaggtagaggaggaggagtaagtgagctggtcaccctctttaaatgctttacgtaatccctttaatcttctgggagataagcattatcatcccctttcgtttcaatcttgtgctctaatgatatttaaattttaccctctaacctaaggaatgaaatgttggtcatacccaaaggcaataagttggaaggctaagaagggaaaagtctggggcaagctacaaggatgtaaactttagatgctgatcagagagatgcccagagcttgatcttattagtcctgtcctccttccctgggctttgagaaagcagggagctttgtgcagctgacagaaatcctgtggtggtttgtacttcctgacatcatggctactgattcaccctgaggacttgacagcttccgttgattttgtcttaatgctgtcaacttcgtgaaataagtcagctttttaaatgtgagatttcttctaaattcctagaaatcagttaatttatgtatttattttctttctttctctctctctttctttctcttcctttctttctttcttttctttctttttgagacagagtcttgctctgtcacccaggctggagtacaatggcatgatctcggctcattgcaacctctacttcccgggttcaagccattctcctgcctcagcctctgcagtagctgggactacaggcatgtaccaccacgccccgctaatttttgtatttttagtagagacgaggtttcaccatgttggccagtctggtctcgaactccagacctcaagtgatctgcccgcctcggcctcccaaagtgctgggattacaggcgtgagccaccgggccaagccatgtatttattttggtttcatctttagcttgctgtgtattttcttccttctctaaatcaatgaactgttctgtgtcatccctttttgtgggcgtggagtgracgcaggaggagacacgcctgcgatcctgggaggaaggagtgtgtgcatgagtctgctactgctgccgtaacaacatcccacagactaggcagcttaaacactgaaattcaccctcccacagttctggaggatggatggctgagatcagggagttggtttcctctgagggctgtctccttggcttgcagatggctgtcttctccctgtgtcttcatgtggtcttccttccaaaactgtgtccaaatttcctcttcttttgaggacaccagtcatattggattagggcctactctaattacctcatttacccttaattacctctttaaagacactatctccaaatatagtcacatacgaggtatactggggctaggacttcggggacacggtttagctcattgcagtatacagtgtatttcatgtcctgtttctttgctgggaatgtgtctaggaaacyctctagtgcttagtccacttggagatataaacatttaagaggagaccatgggaggaaaattgactttctttgcctttgtgtaagcaccttcatcttctcttccattcaaatttcagagtacaaattcagaaatttcttccaaacgacataaacccccttcctttccatctttctgttttgtgaactaggaaactttgccggctataattgtggagactgcaagtttggctggacyggtcccaactgcgagcggaagaaaccaccagtgattcggcagaacatccattccttgagtcctcaggaaagagagcagttcttgggcgccttagatctcgcgaagaagagagtacaccccgactacgtgatcaccacacaacactggctgggcctgcttgggcccartggaacccagccgcagtttgccaactgcagtgtttatgatttttttgtgtggctccattattattctgttagagatacattattaggtgggttttttccttggctgaaggtatattattacaggtttgkgattgggttgagggtatggcagtgggaagtaatttcatgcaagttaattaagagagcaaccacaaggcagccttaggtttatgaaagtcgtagaattatcaaataccgcctggagttagaaggaagcagtttcttcctgtgcattggatgcagacactttaaatgttctctcctctaccgtatgttcttggttcaaagtgtaaacttttctctgtgaagctgttaatcatcaaagatgtgagttggtgaggtggaggcgaattccttttgatttcagaagaaaatatttgcgaatctggccatggaagccctctctgaccttttctccaaattagaggaattaactgaacatgtgctaaggcacatgaagcttctttgtgcggaattagagtgctcatgttgggagtgggcatcttgttaaactcacaggatagatcaactttggatggattttagacagtctatcacatgatagactttcagataatcatttatggtactcctgcatggtccggaatccccaggtttcttggagctttattgtcaaggaaaagtacaagcttagccacagcaatgtagagtttctgctgcttagctctttgcaacacagtcatgttggatgcttgagaaatyggtgacctgcccttccaagtcttaaaaattgggggctgggtaggacttggaatgagggggttgtctgttacaaacttcatgtatcaagtaggttcagctttgtccttatttttcagtcaaaggaaagccatagacaccaatgtattccaggagggcttgactccatcctagattcttcccatagcagttcttgaatgcatggctgcacgtgcacctctccccatttttggggtccttcattggggtcaggatgaatgaagacatcaagctcactttgaagagcaagattctgatttggacaggttcatccttctgctcatcacttgttccccttcaattgataccctctcgttgttgggttctgagaatttgaaaccttgctctgaattgaacatgaaaaagggccgtgtagccaacatcagggacagcagtgcttttctcagtgtgagtcttttaaaacttgccttacaggtaagcatctgtctgtctttatcgatagataaggaggctcttttggctataaacctttatagttttcytgttatcactctgaggaattattgctttatgagagagtactctctcaagaggaaaagaaagtcctagtttctggtcatagctacgaattaaatttatattcacgtctgttcagctctctgaagttgttataggtattttggacaagaactaaagttagctaaagtttccacataaccatcaaagctgttatgaaaaagggaagaaggatggaccaggcagtaaggaggtcattaaatcgtccagagcttttcactaaaattggcagttccagtgtccagcctaaatggcttgaatgtatttttctctcttctggtctcagcgaacatgcttgtcagctagtagttataacagattgaygggtgaggcaaaatacgcgaaagttctttttggttacataaatactgcattaggactaagtgcagttgaagttacaatattattaattaatccctcccttttaaatttatatctttgtgaagcataggttagcaaatgcctttaaaaaatatatttcmtttaggtcttaatgatctattcttttggatagtctatttcacctgaatggattgttgcttacaaattaaatatgtatcaggggctcccaatcctgaaagtcacctgaatttcctggatctctgctagaaatcaaccttttaagagataaaggagggtttatcctaaaagtactagttacttctgaaattcatgtcattactattgcttttggagatataaataacaacaaaacttttttttcttactactataaaacatcatggacttattggctctatagatacagcccaggtaagatttaacattttaaaaaattctattctgtcatctctaatatgtttcccaattgtttcaggaccaggacgcccytacagggccatagatttctcacatcaaggacctgcatttgttacctggcaccggtaccatttgttgtgtctggaaagagatctccaggtaggtcaaaactatgcatttagttcttttaattttttaaaaaatttattgtatatatttaaggcatacartgtgarttttgatatacttatcttgatactcatacaagataagtgattagtgcactaaagtaaattaacatactcagcatcacatagagatatctctttttgtgtgtgtgtggtaagagtacctaaggtctactstcttggcaaatcaccagtacacaatacaacgttaactatagtctcagacctcgagttatttatcctacataactgcaactttgcacctttcagcctacatcttcccatttctcccagtcccttgtaactactatgtaactctctatgtattcactctttttcttttttcttcttttctttagattccacatataagtgagatagtgcagtgtttttctttctgtatctgtcttatttcagttggcacaatgtcttctagattcattcacattttgcaaatggcagggtctcctttttaaaggctgaataatactccattgtacacagtatatatatatatatatatatatatatatatatatatatatatatatatatataatatacacacactgatttatgtcacagtttcttcattcatttatccatccagtagtctttgtcttggtagatatttggttcagatacatatcagcctttgccttgtatgctttcttgttgtatctgatggcatggattaaatgactaggcctgccctttgcttttagcgactcattggcaatgagtcttttgctttgccctactggaactttgccactgggaggaacgagtgtgatgtgtgtacagaccagctgtttggggcagcgagaccagacgatccgactctgattagtcrgaactcaagattctccagctgggaaactgtctgtgataggtaatggctcctgtacctgcaatggcatccagagattgtcttttctgatgtctgagacatggaggagaagtcactttatagtgctgtttcttatgcatgtggtgtcctatttacatgtttctaaaaacagttttcctctgggaggtgggatttcaaaaattcaaagctctttaattaaaaaaaaaatatcaaaatcacatttgtgaattggttatgcttggccatcattttgagatcaggttagttttatcagattagtgcaaatgtaattgcggtttttgcctttaaaagtaatagcaaaaaccacaatttcttttgcatcaacctaatcaaattaagagtagttcttgcattcaatcaacatttgctaagcaccaatcatatcccatgtgatgtggtactgccgggaatacaaagatgaatgaaataaaacctcccttttgaatattgtcttgtattaacgagatagatttcttgtaagtaaattacagttgagtgtgggaagtactgtaatagatgtatacacaaagacaagaagagagtctgggcaagtccccaagaggcagagatgatggctctgagaaggggaggggcacagacctgaggtgtagaggagggtgaggggagtgtgggagggcagtgggtgggtccttgatggaggaacatcatgtgtgaagctagataattctctggaaacagcctggtatggctgagtcacaggatgctggtgagttgaggaggacaggggcttggggccagccggggaaggatgatctgtgacatactaaagaccatacacaggtcagtggcctggcctgcagcccatgaagagttctgtcctcaaaggctccttgaatttgtttctctgtcctggaacacctggaacacatttcagccaaaaatttcccaagaggctcctcacctcaccttcctttattcatttttttcctccaaaatttgttttgttttttgttttttgtttttttgtttttttgagatggagtctcactctgtcaccaggctggagtgcagtgacgtgatctcggctcactgcaacctccgactccctggttcaagcaattctcctgcctcagcctcctgagtagccgggattacaggcatgcgcaaccacgcccagctaakttttgtatttttagtagagacagggtttcaccatgtttgccaggatggtctcgatctcctgacctcacgtaatctgcctgccttggcctcccaaagtgctgagattacaagtgtaagccacctcacccggcctcaaaatccccatgtttttaaccccactgctctgtctttcgtcccaggtccttagactgctccagggcacagagctgtggctcccccggcccccaggcttcactgccaacaccctgagcctgcataggtgtgcgttttgaggggcccatgcccagctagcagggacttcrtcttccacatcctgtacatttcctacagtgctcagaacagtgctccacgagcagggacatcatcagtgctttttctgtgactgagcttrattccatcaagcgccatttcccaccataccttggaatagtagtggatggtatgtgaaaagagatttccgtcatcaagtaaatttagagaaggctgagtttaaaaggtttttaaatttttagaatgtcgtcaagctttccatagataaatgtggtattctttttcaagaggagcctaaccctggaactcttacttcaccggacatcccattggaatccactttgggaaacgctgcctgggaggccttggagacctttttcagcttagtgtttaggtcctggcctctttcatccctgtggatgtgctgattatattctcacatactgggtcctatccctaattcatgaaaaccctcacaataacatctttaaatttttatctctgccagtgaaataatggtctgcactttgggagaccaaggcagggggatcacttgaggccaggacttcgagaccagcctgagtaacatagtgaaaccctgtctctacaaaaagtttgaaaagttagcctagctgggcacggtggytcacgcctgtaatctcagcactttgggaggccgagacaggtggatcacctgaggtcaggagttcgagaccagcctgaccaacatggtgaccaaccagcctgacagctctgtctctactaaaaatacaaaagttagctgggcttggtggcatgtgcctgtagtcccagctactcaggaggctgaggtaggagaattgcttgaactcaggaggtggaggttgcagtgtgccattgtactccagcctgggctacagagtgagactctgtctcaaaaaaaaaaaaaaaaaagttagccagtagtcccagctactggggagactgaggcaggaggattgcttgagcccaggagttcaaggctgcagtcagctgtgatcatgccactgcactctagcctgtacaacagagtgagaccctatctctaaattaaaaaagaaaaactaaataaaaagaaagaaagaaatactattctgatgttggaatccaggccatagcaggcgtgtaggatataatgtcttacggacatgggaccttctcagcccatgctgagcacttaactattgatactctactaccttggaacattttccaacacagtgtttcttctaatatctcccctttgtgtactttcatctgcttttactctgacctccccgtttgccttcagtttgcctaaaaggttttcgtaactttacatgtcacttctgccaaaactggcttagctcagcataatacgaaccaccctattctcccttcagttactcaagattcaaatgcacacaataggagtcatcttgccttgtaaaccctctcactgtctttccaacagaatggtaatgattattcatatttatgcccatgtccgtattttgtgcatctacatttttgaaacttctcgacccataatgactttcaggtatagtactttttaccacatattgttaactctggtaaagtaattgtaatacaattttaccatgattgtgaccctgattgatttgcttggcccaaatttataatactgtacataagttaagacatatcattttttgttttgggggattttttttttttcttgagacasggtctcactctgtcactaaggctggagggcagtggcatgatctctgctcactgcagcctctgtctcctgggttcaagcgrttctcctgccttagcctcctgagtagctgggacaacaggcacacaccaccaagcctagctaatttttrtatttttagtagagccggggctttgccatagctggtctcaaactcctggcctcaagggatccacctgcctcaacctcccaaagtgctgggattacagacgtgagccactgtgcccagccaacatatattattttaaatcttattacaaatcttagcttggatgactacaaccacctggtcaccttgtgcaatggaacctatgaaggtttgctgagaagaaatcaaatgggaagaaacagcatgaaattgccaaccttaaaagacatacgagattgcctgtctctccagaagtttgacaatcctcccttcttccagaactctaccttcagtttcaggtgggtgctctgagctctgctggacctgcctgtacagtacaggttttcatgcctgtgattgtaaagaactggaaggaaacccaggttttgggggttgtctacgaagctaagtgatggagagaggcctaacgagagaagttagcaagggattggtgtgaggaaagtctttacccatctactatgactaacaatgtggttttaataccttctaacttagctgttcaaaaccaacttttgtatttctaattgcagtacattaataggtccagtctttggaaacagggtacttcattaaatatagtgttttttcaatgtccatgctctttctctttcctttcttattttttaaaatgtcgatattagaaatttatcagccatagaacttaatagtgaggtctgagatctcagaggagtattgcagactaaattcaactcaaatcatagcacagcaatgacattacaatacttaacatttaaagaccaactattaatcttccaccacaggttgggcatggtgttcatgcctgtaatcctagtgctttgggaggccagtgcgggaggactgcttgagtccaggagtttgagaccacctgggcaacagagcaagaccctgtctctacaaaaaaatataaaaaagtagccaggtgtggtggtatgtacctgtagaggtaggcctagaatttaagcacatctcaaaatcaccaaagaaaaacacatrtttcatgccctgctcccagagtttctggttcagtaggtgtaggctgtgtcttaacaacttgcatttctaaccaaatcccaaatgatgccagttaaggtggtctgagcactgcattttgagaacaactcccctaactcaaacatatagaaaatgcaatctgttttaatagcacttttgtcacaatgaaaaactaattcatcctccttttcaaaacaaccttaaatgttacccttcccccacctttgacactactctgaaggctgtgtccaacctcagcagactgagccatgctacacttagcacaacctctacatttgagtccagcctgccctgccctgggcccatacaaattgtctactttaaacacagttaagagagagagagaatccagttttggagaagatctttaatctatctaccatcccctttttggacccatctttgtttaaagtcttatttataaacatatttctcataattcttaaagtctttctatggtggtagaaaatttttttcttttttcttttttttagagccaggatctcrctgtgtcacctagggtagartgcagtggcacaatcatggctaattgtaacctcaaactcctgggctcaagtgatcctcctacctcagcctcctgagtagctggaccttcagtcaagctgaaggtctatttggttgagaaatataaatatcagattatatgttaaataaaagaatttactgatcacagacaatctgctgggcatggtactgaaccctggcaataaatatctgaagaaaacatagagcctgctctccaagggaatgagagacagatatgaaagttgtcatacagtacacaaaagagatataattcagaaatagcgttgcttaggagttctctccccttacagaggattatcattaaagtttggggcaaattcttggtcaatttgctatgacagagcttcccatatccctacccaatctcaaattagacaactattatctaggctgaaaacaacaaaaaagagacctttatcagtctttgtctgttgtcactgatatacttgtttctcctaggaatgctttggaagggtttgataaagcagatgggactctggattctcaagtgatgagccttcataatttggttcattccttcctgaacgggacaaacgctttgccacattcagccgccaatgatcccatttttgtggtatgttcaaagattcagaatgcatgaaaattttctagataatatgtcagatttattttttcatacaattaatgtttgatggtgttttattctctgtgtgaacaatgtgatgtgtgcaaatgtaaattaatttcaatctataccatagggatggttaggtagcatttgaaggccctaatcagaacccatgcttcagggatggttcacttttgggtgatcttagacaagagtttacaattccactggtgaattcataaattagcataataataaatgatttttcattggctaagtgagtattgttgaggttcagtagtccacacaaaccaccttcaatgtgttacctgcaggaaagagaggttctgttagccagaaaaggggaggagaatggagagggtgtgctggacacttaaacctcctactccaacttgagtgagctttacttgagaaagaagaaaagcagcacctgacatccaagagctggcctggtgaaatcaaccaggccttggtgtyccctgttggacataaacaatctcctagaacatcaacagcagacaaggccactctgatcatggtggatcaggacaaaaacaagactactccataactgtgtctaagcacagacaaattatgaacattttccaagccacaagatgcatgacatcccctttcctggctaataggagcaaaaaatgacaaatgccttcaccgatggcattaatacaaaaactcacatttgaggcaatttaatttgttaatctgattcatacctctgacatgtaataatacagacagtaaataggattgctgttgactgtgcaggagcctcacagttrtttaaatttcagtgtgatgaactcctttggtatatcagtttgatttctgtctcactttaaaacaaaagaagaaaactgccaggcatggtggctcatgactgtaatctcagcactttgggaggctgaggtgggaggatcacttgtgcctaggagttcaagaccagcctgggcaacattatgagaccttttctctaccaaaaacctttacaaattagctgggcatggtagcatgcacctgtggttccagctacttgggaggctgtggtgggaggatcacttgagcctgggaggtcgaggctgcagtgagccatgatcgtgccactgcatcccagcctgtgcaacagggtgagaccctgtttcaaaaacaaaaacaaactgaacaaaacttgacaataggattctaaattttacaattctgagcttttttagtgtttgtttatttgtttgtttttggagacagagtcttgctccactgcccaggctggagtgcagtggtgctatctgggctcactgcaacctctgcctcctgggttcaagtgattcttctgcctcagcctcccaagtagctgggactacagttgcacgccaccacgcccggttaatttttatatttttactagagacaaggtttcaccatattggccagactggtctcaaacacctgacctcctgatctgcccacctcagcctcccaaagtcctgggattacaggcgtgaaccactgggcccagtctttagtttttaaagtatattcatcccctggtgaacttttctaagacaaacaaaatggggaaatacgagtcagggctacactgttcagctaccctagtcaatgctcttcagtctgtgacctctaggaacacaatgtagttgaatacattggtctgttactccttgcaggcagagaatggaggactgtggaaagtctcagccagtgggtgttggaaaagacagaaagggtttgrgcttgtgctaggtgatttggggaggacttttggaagctttgctctgaatcagatgttgtcaggaagcaggggtatgcttcctgattctatgagtgggtatcttgatagagtgattatgtctgtatatggggcagactagactgaggttaaagccataattggtaaaacagcagcagatgctcatattagccgggaaagggggtgtcacgcatcttgcatcttggacaatgttcataatttgtctgtgctcagacacggttatggggttttcttgtttttgtcctgatccgtcatggtcacagagtggccttgtctgctgtcgatgttctacgaaatcgtttatgtctgatagggggacatcaagtcctcgttgatagcgccaggccagctcttgaatgtcaggggctgcttttctaagtacaggtcactcaagttgtcataagagatttagacaacatacacattcatgtctcagcagccaatccccaaaagtgctcctgctttacagatacgcaactcaccctcgtctattttaaccctgtctgtgtgtcttctgagttgtatgtcttgaatagatagttttggagcaattacaagaagaaatttcacctcttctccttttttattttgccagtattttgagtttatattgttatccagttagattgtgtgatatccaaagactctctgtttttctccagaattttcctcaccttaatgttaatcttagcaatgtgtcttagtctgctcaggctgccataatgaaagaccacagattggatggcttaaacaacagaaatttatatcccacagttctagaggccaggaggtctaagaccaaggtgccagctgatttggttcctggtgaagactctcttcctgagccttctagctgcatcctcatatagtggagggagagagagaataaactctctgatgcctccttttatgataacactaatccagggccctatggttctgacctcattaaaccttaattacctctttctaggctctatctccaagtatagtcacattgtgggttagggcttcaacacacrgattttggggaaacacagttcagtccagatatagcatttataatgcattgtcaaaccatcagtttatagaagtttgtttttcttttcttttttctttttgagacggagtctctctctgtcatccaggctgaaatgcagtggtgcaattttgacccactgcaacctccgcctcctgcgttcaagtgattctcctgcctcagcctcccgagtagctgggattacaggcacgtgccactgcgcctggctaatgtttgtattttgagtagagacaaggttttgccatgttggccaggctggtcttgaactcatgacctcaagtgatcctcgggcctcggcctctcaaagtgctgagattataggcgtgagccaatgcacccagccagaagtttgtttttctggactttttggaggcttcatgactgattacaagtcaatcagttttacttgatacagaccagggcaatcttgggaatgtaattgaaccacatggagcttctgcttcccamtctgcaaagtgtgggtctcttgacctgatctggtggtgaaaatgttgttctcagtgaagtgactcttagtagattaggacaataggaaactggtctagagcccgtcaagtacaatacaaatgttatcataacaataataatgtgttttataatggtcagaattagagaaccatatgttaggtttagattttcaaaccttaattaatatttcttatcttgttctccaaagcagacagtaatgccctaagacattttactaataagcacaaagtcagaagtatttcacaggtgatttattattgttactcaacccagggtacaaaaaaaggagctatgaagagggagagtaaaggtatagctttcaatgattctaagcttgcctgatgggtgtgaagtagctttctggggctcctagatagattaaagcatagtcaggtgagcttcaagaaatcctgagacggaattagttggtagarttgttctttccttctaaaaaatgtttctttcctcatatttgcatagtagcaataaatgaaggggttgtcagaagtctgaattaatggtcccagcctctaacaaggtgggggcttatctgtgacgccgccacagcgatctttgcttttctctagaatgcctgctttgttcaatgattttaacttgatagttcacatcattttttctggctatcgtctcagccatagcttatgccaagcatttctggtgtctgctttctcagccatgtatctgtacatctatttatactatacgtctctaagtatttattaaagcatacattgtcaactgtacaatttatacacacaattcatattcataaggaaaaatgtcataatactccttatccagtactccaatatgttataagtagaacagtggaatcctctgataaattaaggattataccccaactctttctctcctattaaaaatgatgctagtaatttgattttctgcatcccaagtctccaggattgctaaaccgtatctccttcttttgaacaagcctgctaagtggacagaaattggcaacatttttctgtaaatagccaggtagcaaatattctgggctttggaggccagatgttttctgttgtaactactgaactctgcccctgtatcatgaaatcagccatagatcatgcataaacaaatgaatgtggtgttccaataaaacgttatttacaaaaacaggttgtaggctctatttggccctcaggctttaatttatcaacctgtggtgtaaaggattcacttttcttctttgtattagtttgtagtaaggatagtaggaatctctctctctctctctctctctctctctctaagagacagtctctctctgttgcccaggctgaaatgcagtggcatratcatagctcacggcagcctcaaacttctgggctcaagtgatcctcctgcctcagcctcccaagtagctaggactatagccacataccaccatgctcagctttttaaattttttatttttgtagagatgaggtcttactatgttgcctaggctggtctcagaactcctagcctcaagcaatcctcccaccttggcctcccaaagcactgggtgagtcaccatatctggcctgtagtagggatttccctttagtcatatttctccttctgctttagggtggaagctcacattgtgacttgatgggtgagaaatcccgtggttcagagatataagacatttaatcatctttgtgttcgttgtttctaatgtgcttaatgttaaaattttatttttctttagtagtatgtgtaatatacatataaataaacaaaaagccacagcstttctttaaaggcacagaatgaataatgttttgggcctagttccagaactcaccattactttaggctattttcaaagagttttatgctgaagccaattcagccttaaatgatttttcacatattgagatccaggttaaagtatttcagttaacagagttatagcttctggaatttcaaattcatgaggcaattcatgcaaatatattgcacatgacatttattaaaattttttttgtgaaatctctccaagcaatagagctacaaaattgtatgtgatcacaataatgagcaaaagaaggcagaacattaaagtgcaggaaaaactctgaagcaatctctagtaattcctaaggtaattgaggcaaatgcacacatttatcatggaaaataagattaggccagagaaatgctaagtgctgtcttcaatattaaatttagatataatccagaaaagagaaaaaaaaggaaaccaacagactgtaaagttatttaaatgccaagaaagaaactgtgttacatagtggtaatttccttcccaattcctaaagatactattcttaagagtatacttggatgttatccttttagaaagtacatttggtgagttctacgttccttcaattcatcagtggctggggggtccataggttccataattaatactaaacagctcgtgcctgttttctaccttgtacgttgacattctaaatggaatacaacatacagtagtcttattactaatcagtgtataaaataagttcattaatttagaaaatgtgcagcaggagaaaatgaatttctaaaaccacacatagctgatggactaccataaattaaccctgtaagaaagagcccttctgagtctgctgttctaggctacaacaaagttagtgaaatcaaaagctcacaattacaggtataaataattctgagttagagtgagtttagttgaaatttaaaaaaagaaggataggtgtatcagtctgttttcatgctgctgataaagatgtatctgagactgagtaatttatagagaaaaagaggtttaatggacttacagttctatgtggctggggagacctcacgatcatggtggaaggtgaaaagcacatcttacatggtggcagccaagagagaacttgtgcaggaaaactctcatttataaaaccatcagatctcatgagacttattcactatcataagaacagcatgggaaagacccacccccatgattcaattacatcccttccacaacatgtgggaactgtgggagctacaattcaagatgagatttgggtgggaacacagctaaaccatatcaatagggcattgcttttttcttcccaagagtgaaacatttaaagatagatccattttgctttactttaaataagaaaaatcataattagactaatattgtaaaaaaataaaataacattgttgtatgtgaaatttttatttttattggtttatgatttttatattatttataattacagaaatgttggtgaaaatagtttttaaatgcctgtaattccatctcaatttttttgtttatttcttttcatattctcrtatgttttatacagttgcaattatagtcatccctcaatatcttgagggaattagttccaggaccccccaccatgggtaccaaaatctgtgactactcaagtcccttatataaaatggcattatatttgcatataaggtacgcacatccttctgtatactctaaatcatgtctagattacttataattggattcagaggaccatctctataaggcacctattatgtataatatcccattatcacttaatttatttaatttttaggttgttgcatagttttctaaattttttcatcttaaaatcttagtgcacataaaagattcaaaatataaaatgtataaaatgaagtccgtattatcactaccatcttccagcaaacaatacaatttttttctaattttccagatatattttataaatacacaaacaaatatgtttatatatttatctacatggtagcatattatagacccctctgtccctttgcctttcccccactttttttttaacttattccaaatcatttcagttctgaagggcattcttattctttttttatagctgtatagtattcttttgcatggatttatcctgaaatgtattattttaattttaaatttaagattttaaactattttctgttgatggacatttaggtgatttctaatcgtttgctttacaatgctacaacaaacatccttgaacatgtaaggtaagtaaagagaatagaatccctggcttaaagggtaaaaaaatgcatttgaaatttgataaatgttacagaattgcctctagaagtttggacaatattccctcctaatacctgtgtgtcacctatgtgtcagagccacagttcccccatcattccctctcattatgctctttgtccctgtgtcatcacactttttcatctttgtcaacgtgataggtgaaaaggcattttagcaaattttaatttgcatttctcttcttataagtgaagtctaggccagatgcagtggctcacgcctgtaatcccagcactttgggaggctgaggtgggtgggttacctgaggtcaggagttcaagaccagcctggccaacatggtgaaaccttgtctctactaaaaatacaaaaattagccgggtgtggtgttaggcacctgtagtctcagctgcttgggaggctgaggcaggagaatcacttgaacccgggaggtggaggttgcagtgagccaagatcgtgccatcgcactccagcctgggtgacaagagcgaaactctgtctcaaaaaaaaaagtgaagtccagcatcttttcagacattcaaaaagaaaaaatccatttgcacctccttttctgtgatctgtcttcataacttttgtttgtgatcatgacttctggaaaaagaaaaaaaaaaccctaaatattcaaaaaagtcagaattagggaaagtaattcgtcctctgtgtgagtaacaaaatacaacattttcttttaatattttattttcctggaaaacctaataatctggtcatgtaaagatgtattttgtaggttttattagtttatggaaaatgaatgtgatcactgaaaacatactcaacctctagaacagtacctgacacttagtagatgttctgtacatttttgtgaggagaatgtcctattattgtacatctattctgtgatggcccctatgcgagatgtcttgcaaagctcacctcttaaatgaacaaatctgtatatagtaaactactctccttgttttaaacacagggaaaatacagtttagagaggctaagaaatgtgtcaaggtcacaccaatcagtaaatggctgagcagagatttataagaaaagtttcctattcaaaaatctccccgtgttcaatctttcaactacaattttgccttttgtcagtttagacaattcttaactcagtctcttcacaattgcattcactatagctgaggaaattaagtcccrttagatcatattaataggaattaacactaattggtgaagggcagatctgactaattttgcacagcttttgaaatgatagtcattgctttcattgtgagcatgtatttatgctttttaaatgtcacatttacttattcaatactagtttttaaatagcaggtacacagttactacctcctaagtggcataacatcttgatgagttttataagagctgaggaatcagagagggtggctggacccctctctggttccccagggtggcagtgtttctatggactaggctgggggctggcttgttttctttaatttcacaggtgctraatgtcacctgaatggattctcttcaactctagaatttataaggataaatgcatactatattgagaagaactaaacctatgaattacatccaattcattctgataaaatatgaatataataacaaaccacaacttacatacaaatctaagatggttctagcattgagttgagcaactctctcctagagttttcatgattgtttagtcaagaatggcctgagaggtagcttagtctctrtctagaatctcttctagcatcaccttggttctttctccaatccgtaatgtcaacttatgatgcatgttgaactggtcacttcttttaaagttgacctagcagagtctttctgtagtcctctgcatctgttcagagtttaattcttgaagaagaagctttttttcctcaagggtttagaatcagcatttctaattctctcgatttttttttgtatgtgtgctgttagagcttgtatacaatgtatattgtgtacatttttacacacatatagtatacaaggctattatacaagtctrtgtgggagaatgtgttcctgatataactcctccaaaatgcctgagaaatactytctgttttgcctgcccagggtgctataaaagaatggatagggaaatatagggagagaaaattatagcaccatccttgctgcgccctgcctggaagatgctattattgctccaatatctttttttttctcttccgtggttgtgtcctagtccattcaggctgctaaaacaaaaataccagagactgggtggcctaaacaacatttatttctcacagttctggaggctgagaagttgaagatcaaggcattagcagattcagcgtgtggtgaggaacttcttcctggctcataacggccattttcttgcttgtcctcacgtagctgaaagggaggagctctctgggtctctttggtaagggcactaattccattcatgagaaccccatccttatggcttaattatttcccaaaggccccatttcctattaccatcacactgggagttaggatttcaaaatatgaatttgttcggggtagggcacacacattgagtccataggagattgtttctcatcagtcactgaaatattctctctgtgtagtacccacctccttgtggcagagcttagttaattaaataaaggcttgggtgttgtttaactatttcatgcctattacatatggcctatttagggcagtgtgaaaccagcatcccaattacatttgttttcaaatctttggtagaacaagacaagatatttccctaaaatagcaagcctgatgaaatatattttttaggaatgaccattaggaattctctcatttaaaaagtccaaaccaaccttttaatgtataccttctactttaagttttaaattagagttcccatatggacctgtgtgtgcttttatctgtcatgtggcttttaagtgatcacatttgaattgtcacttagttctgactctcagaggaccagagcaatagcatgtcaccacaataggatccagtctgatgacaaaggatgccttctgggcagtaacacatgaactcaagtggtgaaagctacactgtgctggtctttaatgatgcacacacatctttgcagccggcctcatatttccatggttctttctctagatgcagaaacttttcttatttcatctgtgtggtgggaatccaaatttatagtcatttaagctaaggccctttgatagtaactttatcctccaatgatcttgaaaaaataatgcacactttcttgtattttattttctttatgcctgcaggtgcaatatttgttggttgattactttctcctgcatgggttacatgaaaaatctttaccttgaaagcccatgtaatcacatttttttttccattatggcctctactttgaaatttagtgttgttttttttttccttttctgtacctatcctcattttgttggaacaagacagaataggtttatatgccaaaattcggaacctcatttctgaagtactcagtttctaataccaaaacgtagctatgtagccctcgagcagatgaaaggcaccaatgatacaaatttatttatttattattattwttttttttttgagatggagtctcactctgtggtccaggctggagtgcagtggtgcgttcttggctcattgcagcctccacctcccgagttcaagtgactctcctgcctcagcctcccgaatagctgggatcacaggtgcacgccaccacacccagctaatgttttgtatttttagtagagatggggtttcaccatattggctaggctggtctcgaactcctgacctcgggtgatcctcccacctcagtctcacaaagtgctgggattacaggtgtgggccaccatgcccagcccaatgatacactttcatttaacttttgcttttgyttcctaccctcaaatgacatttgaccctttacagagatattaacttgtatttaacatttttaacttgtatttaacaaagatacaattagtttttcaagagcaattcaaggtaccttattgaggaataatgcccacaattttaacaaaactacctattccgtagattgtactacttctctttttagcttgtagatatgttattgcttgtagcattttgttcattggatgctttgcattttctcagcatgtaccagtcttttcaaaaaaacttacattctataatttgggtactctgtatatagttcttactagagctttgttgttgttgttgttgttgttgttgagacagtatctcgctctgtcactcaggctggagtgcagtggcacaatcatagctcactgcagccttgacttccagggctcaaatgatcctcgcatctcagcctcaagtagctgggaccacaggcacacactatcacacctagctaatttttaaatttttgtagaaatggggtctcactctgttgctggggctggtctcgaactcctgggctcatgtgatcctcttgcctcagcttcccaaagtgctgggattacaggcatgagccactgtgtgcagccttactagagcatttattgtatgttttatagccctcctgagagctacaatttcaattcctccttattattttcccctattsttttatctctccagattactaattgccttaggatcttgccttctcctttattatttacatttttcccttggtgaattctgatactttctataagttatttgcctcttacagcactgattctgcatcttccttgtgtcctgatagtctcttgtctctttctgtcatcacaatttgaaccctgacttgaactcagacagtatctaaaagttcatgattggtttaggactcataggtcaaagtatcctctttctgcattgttaagattggagaatatgccttcaaaatcaatttttcttattctagttggtcctgaaggttgtactacagtgtggtggtgtaaagcaggggtccccaacccctgggccatgggcccatgctggtctgtggcctcttaggaactgggccacacagcaggtggatggtaagcaattgagcattatcacttgagctccgcctcctgtcagatcagcagcattagattctcataagagtgcaaaccctatcatgaactgcacctgagagggccctagrttgcacactccttatgagaatctaactaatgyctgataatccaaggtggaacaatttcatcctgaaaccatctcccttcccatccaccaccccctggtccgtgaaaattgtcttcctcgaaaaccagtccctggtgccaaaaaggttggggaccggtggtgtagaggaagtagagtatgtggattaggaactctcactttagaaccagacttcctgggttcaaattcttactctaccatatattagctgtgtgacyttaggcaagtcacttaacacttttgtgccttttattccccatctgtaaaacagggtaataatgttatgggttgaattgtcccccacaaaattcatatgtcaaagtcctaatagctaataactcagaatgtcaccttgtttggaaataggatagctgcagatatagtttattaacataaaatgtcatactggagtagagtaggtccctaatctagtgtgagtggtgtccctataaaaagggaaaatttggacataggcacctgcacacagggagaacactgcatgaggatgaagrtagagatctacaaggcaaggaatgccaaagattgtcagcaaggcccgagaaggtaggagtraggtctggaacagattttccctcacagtgcttagaaggaaccagccccactgacatcttggtgttggacttccagctgcctagaagcgagacactgtctccaaccgtaagacaaatgcctgttgtctaagccacccagtctgtagtactttgttacagcagcctgagcaaacaaataatatccaccaaatcaggctgctttgaggattcaatatgtcattttgggtaattgagcaaacactaataaatactcactaatttacttatcaaaaagtgctaggcatgtgccacatgcattcctaaatgcccagctcctcattggctatatgtacagtgtgtgtgatttcagaggtgcttgcaggccccacccacctgcaaaatgcgaattccatcattcttcttccataagtccttgtcccaagttaaaataataatagtactgatggtatagtcatagtgataacaaccattgaataaccatttcctacaagaaaggtgctgtgtactaggtacctaatatatattatcttccctaccttctcagtgccatgttattggtgtccactgttgaggtttacagacctctgtgatcctggatcatcagctccacaggctgtgttttattcatctcaagctgcgtcactatccccgtttcaccacctctgccttctcattctctgtctggatctcttagctaccctcccacccagggggcagcagtgtggaggagaagtctcaggcctgacattccatctgttctccttcctggaacccagagggggccaggaaaagggggtggcatctctagccccccaacactgaggaagaatggggctcttcccatttcaccccgcccccccacagtttctcccctgcctccaggaatgggccacttctgcatggggcagcgggtcccaattcagctcacactgagaatgtaagaactacaaacaaaatttctattaaattttgtgtctcaacagaaaagagaaagcgaccaaggaactcccttccctgcatgtgctggtaaccatgagcctggraggctctactcaggtttttttcctttgttgtgtttatccatttctgcataacagattacgattacccaaacactcagtggcttgaaggtgaccatttcatttcttaccatttctgtgggtcaggaattttggaagggcttgactaggcagttctagcctagcatctttcagtgcagctgcagtcagatggtgataggtgttggaacagctgtggactggcccgctatctgtttttcttcctgaaatcttgagcctcgccatcatggtcactctatatgagttggtttgggcttcytcacagcatggctgcctcaggacagctggactgcttatttgatggttcagggctcaggcacaagataggaactgcaatacactttatgatttaaccttgaaagtcacaaaatgtcacttctgttgcattttattggttataaaagagtcagaaactcaccaagtttcaagggaaggccagatgaagccaaccttcaatgagggagtggcaagattctagaaaagcatgttagtcaagaaacaaacattgtgtggccttctttggaaaatatatttttgtatatccctagacactgtttatttgcacaaactgtttatgtaaataaagatgcatgacactgtcatcagccaacacatacttagtaaatattgactctgtccaggttgtatgctaagctttgcactgtatgcaaagtgtctgcatgacactgtcatcagcaaacacatagttagtaaacattgactcygtccaggttgtatactaaacctgagacttcaaaggtgaaaagtccttatcttagaccttaaggagttaggatcttgttaggggacatagatacataaataacaagttatagtatcatttgatcagtgctataaatgaggtacarggtacagtggtgaatggaggaatgaatacactgaataagtatttactgaaataagtacctccctttctccatatgagacaccctggggtgacaagctctggggatccagggggaatgaaaaaaggacactgcccctgagctccttgaacttaccatccaggaaggaacaaggaactccaacaactgccatcaaggtgggactgaactctcaaacttgtatcatgttacaaaatcagggctatcaatgtggaaattttgctgttaatatttcaaaacatatagtaattgctatattttaaaaggactttaatggcttccttgagaaaacataaatgagcactttgtacattacctttttagactttcttttgctggcataacagcaagaattcaagtgagagtttatgaaatgagtagacagaagagtattcctggtgagaaaaatttactgttcctttatattataatattgatacagattgagtatcacttatctgaaatgcttgggaccagaagtgtttgggattttgaattttttcagatttyggaatacttgcattataccagttgagaatcccaaatccaaaaaattcaaaaatgctccaatgagcatttccttcaagtgtcatgttggcactcaaraagtttcaggtttagggggattttaggttttaaattttcagatttcagatactcaacctgtaaacacaactttttctttctctcctgttaaaccaaatcatctcaatactagaacatgtatcttatcatacttgcctttttctgaatttcataattaacacatatatgttgaaggcctcaaatgttcaatctgcaaccaatgttaaatccaacatgaactttcatttgctcacttgacaaaggggtttatagtcctgcttggagagagagattcatacatcgttgaaaacttaactgyttttcttcccgaaatcttgatcctcgccatcatagtcactctatatgagttgatttgggcttcctcatggtggtacacagaagrgggtattccacacrtgggtatacagaagttcctatgtcaagaagaagttattccactttagagaaagcaacagtcaggttggtgtgatcggaacagactgatttatgttaaatgctgtgtccaactgttttgcaggttcttcattcctttactgatgccatctttgatgagtggatgaaaagatttaatcctcctgcagatgcctggcctcaggagctggcccctattggtcacaatcggatgtacaacatggttcctttcttccctccagtgactaatgaagaactctttttaacctcagaccaacttggctacagctatgccatcgatctgccaggtaactaacacaacttccaaatgggtgattcattcatcttctaaagaagctrgctttcttgctttctttctttataatgtaaaccaagacctttagccgaagctttcaggtctagttaagtttattgaccatttttctagcatatacgtatttagcaaaaygagcctttaaactaccaattaaacatcagaaagggactaatgagctgactcttgttttagaaaactgaaagttttaaatagatcttattaaatgaactatctgcttttacacctgacttgacaattctctctgagttwattggattaataaaaaacctccctatggttctttgaaatttctaaccaatgaaataaaartgaactagccacactgtacagggactagctggatttagagattattccttgagggcagggctgggattagggtgaggaaagtacaacatttgccttgagcacaaaattcaagaggaggccagaaaactcagtaatcaaggtaagtaataatataatacaaaattttggaaagtcaaaattaatgcaaaaaattaaccatgaataatacatcatcaaaattttaaataaaggcagacttttgtttgtttttcayacccacatcgtcttataactgaatcagtcatttcccatttagcctataccacctgcgatggataggttcatgaaggctgacattgattggtctaccaacagattgggctacgtgggactctatgtgtatgttgcattagttactgtttttaaagtcatgttttaagattgtagatttcttattaacttttcccacttggttcaacatatgggaggatattttgacaagtatatacagggcacatgtttttctttttggcccaggccccaatatggctccacacaccatttaaagaatgttaggagcctggcaacatactgagacctatctctgctaaaattcaaataatattagctgggcatagtggtgcatgcctgtagtctcagccactcgggaggctgaggtggaagaatcgcttgagcccaggatgtagaggctacagtgagccctgtttgtgccactgcactccagtctgggcaacagagtgagaccctgtttcaaaaaaacccaaaaaaacaaaaacaaaacaatttaaaaaatcttaatcaagaaggtgaaaaatcacacagcctatttacccaaagtctcagcctagaaagcaatcaagatgatttcagagctcagtctctctctctttgacctgagtctttcaagcctggctgtagtgggacgcttgggcagagaattacctcraattaagttcaaatttatgaaagagcctaggtacagagggccttagatgccaggcagaaaccccaataagataccacctcatacccattgggatgactgctatcaaaaaaaaatagaaaatagtaagtgttgctgagggtgtagagaaattggaatccttgtgcattgctggtgggaatgtaaaatggtgcagccactatggaaaacagtatggggattcctcaaaaaaatggaacaaataattaccatatgacccagcaattatacttctggtatacctaaaagaactgaaagcaaggtccagcagagatatttgcacacccatgttcatagcagcattacttacaatagccaaaaggtagatgcaaaccaagtgtctgttagtggatgaatgaataaacaaaatgtggtacatacatacagtggaatattattcagcctcaaaaaggaaggagattctgatacatgccacaacatggatgaactttgaggacactaagctaagtttaataagccagacataagaacaaatactgcatgactccacttagactatgagatagtcaaattcatagagacccctggttaccaggggttgggaggggagaatagggagttactgtttggtgggcacaatgtatcagttttgcaagatataaaggttctgagaatggatggtggcgatggtcgcacaacaatgtgaatgtacttaatgccactgcactgcctatttaaaaatggtcaaggtggtcaaatttatgttacatatatgttacaacaatttctaaaacataattttttaaaaaactaagaggatttggacaaaagcaaaaggcaaccattttttggtcttgaacaaagaaatggcagaataaaaatatatgtgttttaagaagatgaagttggcaataggtgctgctgggttgaatcaggaggagacagatcaaaaccctcttggaggaatcccatcaggacaggtcaggacctcccatgggattgcagaaaaaggactagaaagagaatcttatattaggtgagtgtaaggtatagaacaaattcagaggagctgaatttaagaacagttggccaaggagaatataatttttaaaataaatgaaaaataggcatatgtatattaaaaatgaaattcggccaggtgcagtagctcacacctgtaatcccagcactttgggaggccgaggcaggtggattccctgcagtcaggagtttcagaccagcctggccaacatggcgaaaccctgtctctactaaaaatacaaaatttatctgagcatggtgatgggtgcctgtaatcccagctactcgggaggctgaggcaggagaatcgcttgaactcaggaggcagaggttgcagtgagccgagatcatgccactgtactccagcctgggcgacagagcgagactttatctaaaaaaaaaaaaaaaaaaaaaaaccaaaaaatgaaatccactaattttgtggaagagagcttataaaatatatgagagtagaagattggatttatcatgtgggagatttacattttattcacaactatttgaatgggtataaatatcatctgcttggttattgagtgtctcctggtgtaatagccagtctgatccctctcacaggtttatcattctataaaaaaggtagagacaatagcagaatttctcttcccaagggctgtatattttgcagctccccagatgccattttagcatgcactttcacaaatgagtttctaactcagaaaagtagttacattcttccttagaaggtttcttcggcataagcatttattgtaacaaatttttaaaatgcaataagctgtatttaagtaatgggatgccagttctgactaccccaagaaaaacaattgtggatatgataaatggtgagaaaggagaagataaattttagtctagcatgagtagttttgctttatcaacaaaaagcacgtgaaaggcaagtgcgcttgctctttttctcttctgaaagtattcagctgatgaaaatcctgattgtagacccttctcttctgctttagtttcagttgaagaaactccaggttggcccacaactctcttagtagtcatgggaacactggtggctttggttggtctttttgtgctgttggcttttcttcaatatagaagacttcgaaaaggatatacacccctaatggagacacatttaagcagcaagagatacacagaagaagcctagggtgctcatgccttacctaagagaagaggctggccaagccacagttctgacgctgacaataaaggaactaatcctcactgttccttcttgagttgaagatctttgacataggttcttctatagtgatgatgatctcattcagaagatgcttagctgtagtttccgctttgcttgcttgtttaacaaacccaactaaagtgcttgaggctacctctaccttcaaataaagatagacctgacaatttgtgatatctaataataaccccccccccaatattgattaagcctcctccttttctgaaagcatttaaaaaaaacaaaaaaaatcccaaaacattgatccaggggagtcatttaaatttgcaggtcagtgcaatgtgagacctggccaagaccatacatcaatctttcttagccccagtgtctttattggtaatgccatggaggtgggagttggtaggtgctagatgagtctccaagatcccttttagctataaacatctctgcttctaggcaccctcctgattatcttccttgggcttctttttcttcttttctctatatttttcctctccagcttagaagatgagaataagccttgttttctttacaggatggaaaatgactaaatgaaggatcaattccactctattgtgtaaactagattttacggattttacttaaaatctgcagttttaaacagtagacctatattacaggattcaatagctggatacacattgattctatagtgataaatagagaagataataaaattatagagtttcctggttagttgatatrctactgtaaacctattaacaaatacagaattactctttccaaggaaggctgactgaaggctggtgaggctgtaaacctgaacatgagacaatttgacttgagtcccattactctgaggtctctttggctgatcctctaccaatttctttactaggtagcctcagatgaaaaattattcccacataatgcactgggcttatttttaagcattgatgttagattgattaatgttgccgaatactcacagttacttatgaatgctgatcaattaagtcttatcatttgaaagcaaaccatctgtacaaaacatgacaattcagaattaagtggttatattctgctatgcaatcaycagatcatgaggaataagaatgagacaatctttactacgatgttcagacttatcatgatggaccccacttcagagaagttaatggctcttgagatttccaggcaaatttcatctgctcatatctggtttctgtgcatcaggagtgagactgaagttctagggcgtggcttgtctgtcgaggcccctctctactggaatgaatgaatgtaaagaatgggtgttaagaggtccctggagctgccttcaacataaggggtcctagagggtgcaagactcatcaagaaccagtttaccccatgcaawaggactgctaaagccagagaaatggacaaagcccagttggaactgaatttgaatctcataaagctacaggtgcatctgagagcaggctcagtggtgaagatcaagatagcccggtaaagccctgcttgggctttttagcctcagccacatggatacctctcagttcctgccattaacaatattcatggaaaatacagcactgtgtctttcacatgctccactctggaaggtttatgctctgagctcaggatagttggggaacacatttttaaatcttggttttaaacaaaaagagaaatttattaaaatggagatataattgtgcatggtacatatatttctgaaaagttatgtataaatcaattatgttaaaagcgccagaagttactttttataagtgaactattacgaataatttcataaagcaaataaccacctctagcttatctgtcaggtatatcagaattctcatatatcatagtctcataagacttggttaaagcagatctatcttaggtaggaaaaaatagtaatcgattatacttagctgcttttatctgtagtgtgggtgactttttataactattatgttttataatgtcttcctgagagaatttcctaattttgtagttcatataagagaaatacaattttctagcattttctgaccttacaataaatcaattatgaatgcattttaacaaatattaaggtaggataaaccaacagaataaaaagttggtatttacttacattgaatatcatgcaaataaactcagaaaatgtcaccaaatactgtgggctatatttctcaatgatagggggaagaattcaaccttggagaaaatgaccagatcactttactgcttatatcttcagtattagaaaaactgcatgtatgattttaatagaaatrctttttataaagctaacattcagaaatgggataaaatgcaataacatctttcctttgtgcattaaattcccttctaattctaaaattgacatttgtatcttgcttaggatttaacattgttaattataatacttttaatgactagttttaatctcattattaagaagtagaaaacttactaaaaaggaaactaaaaataaatgttgttttgcagattattgtttgtcttttgaggattattgttttttaagtagtgtgcatcaattcccatcttttgggcactcagcatgtatattgaaatatatatacatgtaaaatatataataacaacctcagtctgaaaaataatctcttaaactgatatgctattttctggtgagtttccaaacaattgctattttctgaatctgtttgaacaggtaggaaaaggagagccagcctttcctcaggtgaagttacttttgatattccccacagtttagtgactaatcctggggtggaagcaggtggctgcttcaagtgactgaccagggaagagaggtcctgcagtagctaacttggtgatctcccagataagccttcaagatgggtcaatttgttggagactctaaggttgaagctcttcctatttctatagtgccttacttatcctgagtaytttataaatattctttgaatgaataagtgaatgaataaactaatttcaaagtagaatgtttcattcagagcttctgacatctgttttaagatgtactggataaaacataagatccatctctgccatgaagttaccatacaacctatccttcagattttgaattgcacgtatgctaggtagaatcatactctatgcaacctaacacaaggagatactcttcaggtgtattttctttctagatgtatcttcttcctactattggtaggccttaattctaccatttttagggactaggataggaagttaagatttctacccatctctcctctaagtcctcacacatgccattttaggatcctccactgtctgatatcctaaaagctttgtttcagtggaaggagttagtgggcaaattatttagtcaggcaaaccaatgcctctctcacactgatggactcaagcagcaattgctttagaaactctccaaagatgacaatactttgactttagccgtaacagcagttcaagctgaaaaaaacccttatgaacttaattctgctttggcaggtcattaaatgaaatmttgaaaaccatacacaagagtattgtgaactagaagttaaagttttctaaaacaaaacaaagttaaaaggttcctattcaatacttgcatgctctgtataattttctccacagctgcatgtttgatggaaaccattggcccacttttgttatttgccccatcaactttagtcagacttcttaaatctaatatgactggatttggtcattctgttagccattttctgctcttttggcattttatgaacaaactaaaactatcacagcgcctcccaagtataattgtactggttgtaaataatgctaagtagagatgcttgagcttggccttctttattaaaacaacagatttcactgccagagttatgcaccctgattactccttcactttgtatgttattgagggtttctgaatttgcaattagcccagtgactgatcttgattaccaggggagtggaattaggcttacaataaagcaaaacctgccctcttgtgttttattagaaaattgcacaatgtagtaaagttcttaaagctattttcctctaccatggttgatggtctaccccgagtggaaaaaaaggctggaagatttgccatgaattcagaaatcagaacagacaaagcacaatatttagaaagaaacagtttcctacataggctctcacgattccccgtttaatctattttgaaatgttaaatgtttaccagtaagccagaaaagtttagaggaacatttcaggccactgggcaaaaatgcttttaggcttggcaaacacacacagaatataatttagttaaatattatttatatgatcacattgcagctggaaactggggaaacttattttttctattaaaaaccgtcatcaacaagaaaaatttggggaacgttttttaaaacaaatgttggatcaatgtattaaaactatatataaatatttgaactcaggtgtgggttgagcagtgtctgaagatgtcctttagtgtggaaaattcgcttttcaaaactgggagcccatggtggctttatgttaggtgattgataaactcaagtgataaagaaaacatggcctctttctagtttttataaacctttcccctctagggaaatacacaggtaaagactaaagagaaacacgtgcacatgtaatttatttgcttattctggctagttttgtttgtcagaaaattggggcttcgattttccagctatgtctacctgctcttcttttctggtggttctctctggaagaagattacagacctggtgatagtcattgtttttatggagagaaaggaaagggaaaaacataagtgaagaaactgaagagtctgatttgaatcacatcaaatgctgacagaagatgcagtctttcctggagaagaaccattagcttactccctactgatacactatatagcatactttgctgaagacctattttccaatgcggcaaatgtattattattttaaattattattattattttttgagatggagtctcactctgttgcccaggctggagtgcagcggcgagatcttgactcactgcaggctccacctcctgagttcgagcgattctccagcctcagcctcctgagtagctgggactacaggtgcacaccaccatgccatgctaatttttgtactttaagtagagatggggttttgccatgttggccaggctggtctccagctctcgacctcaggtgatccacttgcctggacctcccgaagtgctggaaatataggcgtgagccaccgtgccccaccctgatattattatttaataatactacttaaggtttcatttccagtatttttatttgttttttcaaatagcaagatttgtcttgatcattgccactaatcagtttttccttcctaaaattatttttgtattttgagtcttgcatttcatgtcaaggaggtgtgcacagcagagacatgtatgtcttggtgctttaagtcattaggctcatttgtacgagcaaatgactggtctcgaaaacagaagcgtaatctctataataatccgtgcagttagctattgcttctttttctcttcttcaactgtggcaagcacacaactttcaggctttcctagcttgaagtctgatttgagctgcccattttcttttcattttaggcattttacaattccgagacgtgtagcatttttataaactcaaggtcattttctttctttctgtgcatatctctcctcactgatgtcctcttatcaagatgcaggcttctttgtgtttttaacatttttacttgagatatttccaacgctttgattccgtgctgactctaaatcgtttgctgtcagctacacttagtgcagatctggtgcgtctcggccgccgctcagtccaccgagctcttgacagcattatcgggcctctccaacaatcaaagggctcttgcaacccagtaacatgcaaatttgttctttatctgcttcagtctgtcgcagcgcacattttgcagcttagctgcacaaaagcaggcgtgatgaaaatcattctgaagttgacgctgggagtaatgggtataaattcattgtttttaagcaaccgctactcacaacatgcaattacagtgaactcaccttgcaactagatggctgccttagagctggtttccccttgctggagagatgatgcaattgagcggcttttatcacagggcaatctgctcacccttgctgtacttgtcagcaggtaatccccctgctgctctctgggtttgcccaggcttctgggtgtgtgcttatctatacacagtcccaggagaaaacaaatcctcctctaggtgcggcagctccttccctttttatgtctgtcagcttacccgactagaacttgttcctttccaatgaacactaaaaatgccaccaggaaatattaatctcaaaaagcccactatatttttttctacttgaaccaccaataagtgacttgacctccctgtaagaaatctctggaagtctaagataagggttcttggctcccatgaataacatggtctttcctgagcccagtgacaagttagtttcaacacactctggcgtaattgtaattttctctgtagaagcgagcactgagtctgtggtcagggagggctctcaagggatattttcaatgataaaggggcactttgggaataaaatatgaacaggcctcagccgacgtggaagtgaaacatgttaggagagagttttttctttttccttttccttttcatttctttttttctttttttcgtgtaagagaaacataacataaaatttgccatctgaacctttttaaagtgtacaattgagtggcattcagcacgtttacaatattctacaaccgttaccaccatgtttccagagctttttcatcatcccaaatagaactctgtactgttaaaagaaaacttcagacaaattaaatttgatggaatttaattgagcgaaaagaagaattaaccgttcgtgaatcgggcagcccccagaatcacagcagattcagaaagactccaggggtgcctcgtggtcagaaaaaaatatagacaaaaaaaggaaagcgatgtacaaggattggaagtgaggtacagagatagctggattggttacaggttggcatttgccttatttgaacacagtttgaacactcagcagtctatgagtggctgaagcatggctgctggaattggccaacactcagctattgttacaggctgcatactcctaagttaggttttcaatcttgtcttcctattaagctaggttaggtttgtccacaaggactcaaatatagaagtacacagtccttctcaggccatatttagttcactttaacagtacccattaaatggtaactccctccctatgcctcctcccaccagcctctggcaacctccaacaaggctttgggaagttccttccatctccatcctgagaccctcagctctgtgatttggatgggaatctaactgtcttaaacaaattactctattccagacccttggccatggtgtctcagccatgaatgtgaaactgaaagccaaataatggaaaggcacttttgctgagggttctgagaaatgaggcccaaagaccaggtctcacccctgagtcacatgatgtgaagatgtgaaggctggaaatgtagcagccatcttacctgctagaggatttatagtggccacttattaaaaaatttaatttaatttagaagtagccacttaaaaaaattaatttagaccagtttgagttgggggtttctcttacaagataaataatcttaactaatgaactcatcttcagagaatttaaaaagaaaatgaggaaacagaagcattggctttcttgcttatttatttgtagataccatattccatgtttttaagtgagtaaaaaaatttttttttctttgttctttaaagattgcaagaaacggagtgatgtagcaattcatagtgaaggatgccagcaatatacagaaacaggagcatgtagtggttcagcatggcctctggaggcagacagagaacgggcatttaaattctagctcaatcatttatttagcatgtaatttttctttaacttgtattttctaactgctctggactttagtttccctgtctgcagaaggatgttgatgcccctcttgttccatttacacacacacagaggctgttgttagaatgaattgagttaatctatgtaacttcttcagaacagtgcctgtcattagacggggtggtttaaacaatggaaatgtatttctcacagtttggaggctggaaatccaagatcaaggtgtcggtagggttggtttctcctgaggcctttcttcttagcttgcaggtagtcatgcttttgctgcctcttcagtctttcctctgcgcatctgcacatgcctggggtctttttgtgtgtccaactttcctcttctcacaagggcactggccaggttggattaggacccatcctaacagcctcattttaacttactcacctctttaaaggtcctggctccaaatatggttcctttctgaggtactgggagttgggacttgaacatatgaattttgggattcaacttgaaacagagaagttgctcaataatatttaggttttttttgaagttttagatctggggttacacatgcttgtttgttacatgaatattacatgtgtaatggtgaggactgggcttctggtgtacccatcacccaaatattgaacattgtacccaatgggtaacttttcaactctccctccccttccactctcctgcttttggattcccagtatctgttatctccttcttcatgtccatgtctgcccattgtttagctcccacttataagtgagaatatatgatatttgatcttctgcttctgagctcacttaggataatagtctccagttccacccatgttgctgcaaaggacatgcttcattgtt

SEQ ID NO: 95544 - DNA, 53598 bp, Homo sapiens
agcgggcctgaatcctcctgcagccggcctgaatcctcctgcagcctctcgcctccctagctcctcagtgcccagagctagacccaatgccaggcacctgggtgaggattctgctcccagcatctcagctgaggcaaacttgctagccagggtcccacaggcgcccctgcctgctggatggaaattgttactaaacaaggcccagatccaaggaagatttgtaaactgggtttgccccagaaatagaacagggccggtgtctcctggcctggctgccagctcagtggccctgccatcctcagagctcccctggagtcgggggaggccctgctgaccctgctcttgtccccagaggtggccggcaggttcctggcgtyggaggccagcacacacctgctggtgttcggcatggagcagcggctgccgcccaacagcgagctggtgcaggccgtgctgcggctcttccaggagccggtccccaaggccgcgctgcacaggcacgggcggctgtccccgcgcagcgcccgggcccgggtgaccgtcgagtggctgcgcgtccgcgacgacggctccaaccgcacctccctcatcgactccaggtgggggtcgcgggggcgcgcagggtagggggagggcgctgctaggcccggcttgggggcggggacgcggggggcggtgcggggtcctcggggcccgtcccagtccccgccctcaagcggcgctgggtctctgtgtcatgtctcaggctggtgtccgtccacgagagcggctggaaggccttcgacgtgaccgaggccgtgaacttctggcagcagctgagccggccccggcagccgctgctgctacaggtgtcggtgcagagggagcatctgggcccgctggcgtccggcgcccacaagctggtccgctttgcctcgcagggggcgccagccgggcttggggagccccagctggagctgcacaccctggaccttggggactatgggtaggtgctgagggtcaaactggtaagccggaataaagagacaggcaattacatttattttgaaatggacaacttttcagagtgctgtgggaatgaatgagacaatgtatacaattcttcctctgactcttaggagatcctcagtaaatatcggttattaattttcaagttatttctagctgtccatcctatatcacaaacatccagctttttgaagttgagaggtggatcataaatctccatcccagacgccctctgacctcagccctcccagctgaccgctgaccctgctctctttgcccacacagagctcagggcgactgtgaccctgaagcaccaatgaccgagggcacccgctgctgccgccaggagatgtacattgacctgcaggggatgaagtgggccgagaactgggtgctggagcccccgggcttcctggcttatgagtgtgtgggcacctgccrgcagcccccggaggccctggccttcaagtggccgtttctggggcctygacagtgcatcgcctcggagactgmctcgctgcccatgatcgtcagcatcaaggagggaggcaggaccaggccccaggtggtcagcctgcccaacatgagggtgcagaagtgcagctgtgcctcggatggtgcgctcgtgccaaggaggctscagccataggcgcctagtgtagccatcgagggacttgacttgtgtgtgtttctgaagtgttcgagggtaccaggagagctggcgatgactgaactgctgatggacaaatgctctgtgctctctagtgagccctgaatttgcttcctctgacaagttacctcacctaatttttgcttctcaggaatgagaatctttggccactggagagcccttgctcagttttctctattcttattattcactgcactatattctaagcacttacatgtggagatactgtaacctgagggcagaaagcccaatgtgtcattgtttacttgtcctgtcactggatctgggctaaagtcctccaccaccactctggacctaagacctggggttaagtgtgggttgtgcatccccaatccagataataaagactttgtaaaacatgaataaaacacattttattctataattttgtaattttctattttattttaattaattaattatttttgagacagagtctcactctgtcacccaggcgggagtgcagtggcccaatctcggctcactgcagcctctgccttccaggttcaagcgattctcatgcctcagcatcttgagtaactgggattacaggcatgtaccaccacgccaagctaattttttgtatttttattattattattattgagacagctctgtcgcccaggctggagtacagatggcgctatgttggctcactgcaagctctgcctcccgggttcacaccattctcctgcctcagcctcccgagtagctgggactacaggtgcctgccaccatgcctggctaattttttgtattttttagtagagacagggtttcactgtgttaaccaggatggtctcaacctcctgacctcgtgatccgcctgcctcggcctcccaaagtgctgggattacaggcgtgagccactgcacctggcctaattttttgtatttttagtagagatggggttttgccatgttgcccaggctggtctggaactcctgacctcaagtcattcggcagcctcagtctcccaaagggctgggattacaggcacaagccactgtgcccggctgtaattttccattttaatcaaagctctgcaaattgaggaaggagcagaaagttctacagcgattaggtcaacctgattgtaaaactaaggaaggagcttgagttggccaagacttggtaaagatcttggttaggtaatacatgaaactaggattaaaatgctttcagggccagcacgatggctcacttctgtaatcccagcactttgggaggccgaggtgggcggatcacttgaggccaggagttcaagaccagcctggccaacatggtgagagtgcatttctactaaaaatacaaaaattagctgggcatggtggtgtgcgcctgtaattccagccactcgggaggctgaggcatgagaatcgcttaaacccaagaggcggaggttgcagtaagctgagatcacactactgcactccagcctgggcaatagagtgagattctgtctcaaaaataaaataaataaaaataaaatgcattctgattctagaatctatggtacctgccctcccagaattgatacagaaatttctttttttttttttttgagacggagtcgcccaggctggagtacagtggcaggagtgcagtggcgcgatctccgcttactgcaagctccgcctcatgggttcacgccattctcctgccttagcctcccgagtagctgggactacaggtgcccgccaccacgcccggctaatttttttgtatttttagtagagatggggtttcaccatgttagccaggatggtctctatctcctgaccttgtgatccgcccacctcggcctcccaaagtgctgggattacaggcatgagccaccgcgcccggccaatactgaaatttttttgttcttgacactttgactttcctgggcatagtgactgggctttattccaatcctacttgcatcaaaataaaatctgtgatcaaaattatcatctatacttagagaagaaaataaagcttcagaggatctggaatttatagctgtaagagctgtgcagctgggcgcggtggctcacgtctataatcctgaggatcacctgaggttgggagtttgagaccagcctgaccaacatagagaaaccccgtctctactaaaagtacaaaattagccgggtgtggtggcacatgcctataatcccagctacttgggaggctgaggcaggagaatcgcttgaagccaggaggtggaggttgcagtgagctgagatcacaccactgtactacagcctgggcgacagagtgagactgtgtctcaataagtaaataattaattaaaaattaaaaaataaaatagtgattttacaagcacttcacacaactgacataacaaaggctgtggctatctcaactcacatatcgatccatcaaggccttctcttgattttgaaataaccttaacctactcaagaacaaatttagaaatcctttctctctctgaaatctttgtcagtggctccagcattctaattaccaagaccggaaccttgcacttgcctggacccatggcacagaccagacaggtgggggcaccattcattgaggaaggaaggaggacaggcaggtgcgggagtggggagtggaagaaagattggacagggacagtctaaggagccaacggggagtccaggggccacacccaggactctgcagaccgtcagatgtggaggtaagagagcagggaggggggatggccaggcgcagctatggagggacaagggcagagatgatactggcggggggcatagaggaaaaaccctggaaaataactagtggctagagctttggggagagaaggggaaagacagatgggacagaaaagaactgagagaggcaggaagagaccctccccaccccactcctggacagccacagactggcgctagaatcagggacagggaggtaaggaggaatttttttttttttttttttttttttgagacagagtttcgctcttgttgcccaggctggagttcaatggtgaaatctcagctcaccgcaacctccgcctcccaggttcaagcgattctcctgcctcagactccctagtagctgggattacaggcatgtgccaccacacccggctaattttgtatttttagtagagacggggtttctccatgcgggtcaggctggtctcgaactccagacctaaggtgatccgcccacctcggcctcccaaagtgctggtattacaggcatgagccaccgcgcccggccataaggaggatatttttatgccgttacagaaaaagatgaaagctcagaaatggaagggaggtcggagaacctgcaaaggcatgcatgtggggtgaggactgctcagagctcagagaggggtgctggaagggacctgagaggaagctttggtccaaccactcatttcacagatagggaaacaggggcctgcggacgggttggtttgctccttgattcccagggcgcgcggtcctccccgaacccagcctcgcttcccgcgcagcgcccagcagtccctggcgcggcgggccggccctgccctcgcgagcttgcggtccggttgtggaggccaccggctccctggaaacatttggctcccggccgggaggcatgccgcgctctcggacctgggctggagtaggtgcccttggcggccctggctcgagcagtaatggactagccccagggggcgttggaaatgctgcgacccgcccccacatttttgcccgaacggagaccctccgggctttcacggtccggccttctacagcggcgggggagccgtggcctcttgcagggcgctccgcgcggttcccgactacccggagccgaggtgcgggctgaatcctgctgagctccccatgctaccacccccgcaaccccactctcccggggcgggtctaagagctcttcggggaaattcaaagcactacagggaccaacgtttgcagatgctctccctgcgccgcgaccaccctgtgcttggcccagttctcccggaggcgtccagagactgggctcgtgccgggggacggaagagggtgcgccccggcggatcccttcttggagcctggacgtgagctggccggtccggggcttgcagacctccgggaggagctgcggggctgagcggcgaccaggaggccaggccggggcagaggaccgccgagggccaccgcgggaggcgcagtcagctgcgtacaggcttgcgccgccgcgggccaagactccaaattgggaaaggggtggccgcagctctgcgcatgtgcaggaggcgccggagtttcactttgtaacttttaagtggtcggaacacgccccgcgctgctgggtcccgccagacacgccgccgccgcaggtacaggggacagggggcgtgaggaggggcaatgcaccctccgcctttcccgggacgtgcgcgccaggtgtccggttccggaacggctcccagcctacgcagaccccagagcccccgaccccaagcagggggtgacgackcgggattgggtgggaggagagggtccgggcagcgcctccattccagccctgcgctccttgggaattcctggcggcttttcaggactttcctctccggcttttcgctttcagggctggtatctccttcttccccacccctctctttgggatttgtcggcggagtccgacctcccacctaactaggagtgcagctatgggctcctcggaccctatacgaggccgggctgggaaagggccaagcgtccgactctcctgacgccaggaaggcagaggccacccctcgggctgttcctgggtgaccacttcctgcagccttggcggagtcctgaggagggaggctggggactcggggactggggggaagggcgggggcggaaagggtgaggcgagctctgctaagaaaccaaatccgcaaaggttccagcacctgataagactagctacctgaggccctggaggggccttggtcattcagccccaggcaggtggtgtcctcttcaagggcaggggtggacagcgtggcggacccactgaccctcccttgacacctctcaggtcatcctcaagtctgctgtgccttcaagggggatatgaacggaagccgaggctccttttcccttcacacgcccctctcctttgtttagtgtgggggcaaaggtctctcctagctgttcgttgggctctaacagagaagacgtcaggtgggatcctgcccttgtgtttcccattagctggaggggcgacttaaaataaaggcagacagcttctaattgcttgctagggccgggtcctgggctaagtgctttacaggtgttgtttgggatctgtgcctcccaacagctccgtgagagaaagtcatcactcgcatttcctggcgaaggaagccaaggcacagagtggttaggctgcttgtctgaactgcgtggtgctgagaccytaactccagagcctgctcacataatccctgagccacactgcctctggtttcagccaggggctgtgtcatttcctttgtgctccagggtagaggtaaacagttgtccaggttactgggtcctgtttggtgttgccataaggagaagtttgtactttactttgcaaccttattctgcatctgaaagaccagagttagctcctgaggcagaaggcctggagctgcttgtagtttcgctattgtcatcacaggattgaaagatttggtgatgataaaattaccctgaatttgtacgggccttcttgcaagaacgaacaatatccatatacttcctgcaacattctgctggtatttctagagcttgtcaagttgaccaccaggccagtccttgctgccaatggagactggcagtggattagcataggtagtttactttggcaaatttagaccagctgttggatttagccctctcccactggccacaatcagacgcttgcctgcacatgggttgaactttgggttgggagcgtgaagtcacctgctgcccactctggctcttgggcctcagcagtaattcttggctttcctaccctcggcatattgagtaggaataaggggatgaatggagaatttctggaaggcacaggtaagtgctaggcattcacatacatctaggatgactgaatattgccaggggttctcagccaggcagtgccacttcaaccacagtgcctagctgctggtttggcctcctctatacagctgccagctgggtgctcccctccccctgccttctcctcagcctggcagcactgtcccatggtgtctgtgttcccagctgcctgctcagagcgtgcctgtttgtgaaaatgcagaggagctgtcccatggagagccagagggacggagctgtttcagggggatctggactttatgtgtctaatgggcagggacaggctgggactgagctgaaaggtctgagagagattgtgggtccccagagctctaccctaacctgggtgctcatcggagagggcagacaggactggccacctgaccttacctcygtctcaggctgatagtatttgctagccacctccctgagttcatatcaaactttgtcaaaccaycctgggaagcctatttggcaagagacaagtaacttagaggcatgactggggctggagggagggggaagaggagccgcaggtgtttccctccgcagaggcctctctcctctctgcagcactggcgagggtatgccactcccagcaccaccacagcaccctcccctttccagggacaatgctctctctgtgagcattttatggggatgttttttctttccacttcacatttcaagccttccttgttcatgctgctgtgttcccttttcctgattctagctcttggggaaccctggggagcctccccagtagcattggcccttggggcccaggtgaagtcctttgcttggggccctaccgtgagcccacaacctccagggtttctgtgggagagggctgctcccctagacccagcaggtccytgagccattggcaaagaggagagaggctggggccacaggtggtgctggccgaggaaggaggagtagggtcgcacagaggagcactgatggatggagaaccagttctgggagtttggggagagatcaaggcaggagggagcccactgggcagaacctaaaggtccatatgggcagcatgcatacacaggtgtgtgctggagggtttccatccagacccctacactggaaaagggtggctcccatgtgatgcttggtgtctgtgatccttcaggaaagtctacagtttggtaccccaggactcgctggtcaggaaagccctgcaggacatgagtgttaggcccgacgcctggcccttggcagcttgggaggtggctggggctgcttttgcctttgccagagacagctccaactgaggacctctccaacgggcccatccacagtccttccttcccctagtgtctggtaagtgtggggacaggaaggaggaggggtaggtggtggccttgaagtgttgggctggkgtgttccattgggtggtgccactgggggattttaaagggaagccaagaacatctgtgttccagaggtcactcttgtgacactctgttcagagtcagcagccccatgactctggcatcacaacccccactacctccagccattgccaagtctcttagaaggttgagaaagtsacttggctgtctgtgggatgctcccatgttcttgggctttccactcattcatgcttcctgtgcttcgtgtgtgtgtgtgtgtgtgtgtgtgtgtgtgtgtaggtaggtaggtaggtaggtaggtgtccatgtgtgattgtccccagcactctaggcctaggggttacccaacatacacacctcaccagcactactggtatccaaacatctgtttgggttctctatatcttttcttcttgttctcaagatctttgtccctgtaacagctagaagcaccagacttagcagaaaaatcccctgggaattctagatttaccagatttgggcaggtaggatcttaagcaagtccaggctgaatatgtgttctggcccttcagccacagcatgagaacttggacactaactcccggtcctctggtgtcaggggacagacactggagatttctattagcttcaccaggggcgccaggagcctcaggaaggaaaggtcaacaacccagcctggagcagtgtttgctttggaaatgctgggccttgcagttagactgatggtacccaggaggggtatgtgtgtgtgaaagcrcagagctaggggacccagaggtccctgaggaggccctgggactcctgactccctccccgtccctaccctagaccaccccctttactttctcctctgtggcaaagtaaaaagagaagtggcatctgagagtcaggatattgggtttgggattcaattctgccctgaccagctccttaaccttaactttggggcaagttattaaacctctgaggcttggtttccaagtatagcagatggacccatctctgaggtcccagctctgacattctgtgagcagtgggagtgaggtgttgtctgtggctcgtggatggaccatcgtgaatacttggatgttcccttcttccctgkttgtttatcccggtgttttcctcttcctgcctttgtgtgcctttctccctctcctctgcctgtactctagatccgccagtggcttctgcaggagtgactttcccaacacgagtcctcgaggctagaggaactttaggacttcttaagacagcagctgcagcaactctgtccctcctttgctccatgtcgccccctctggggatctgcccactgtgtyctggatgagccatccactctgaccatctgatcccctgagattgtcccacaatgcagccattctctgtggacactgccaggcaygcagaggtccaatgtctggctctcccggactccttgctgctggctyactgcccgatcagtccctgggaaacgcctgcctttggctctgccagcactggtgggaacctgcaagaaatttgagccctgaacgtctgccttgtcctgttgtcctgtgctccagggargacaggcgcgatgatggactccccgttcctggagctgtggcagtccaaggcagtgtccatcagggagcagctgggactcggggaccggcccaacgactcctattgctacaactcggccaaaaacagcaccgtgctccagggggtcacctttggtggcatccccactgtcctgctcatagacgtcagctgcttcctggtgagagccctcatgagtcgtgtcccactgcctcagttatttgtttaaatgccccacccagggccttctgggaaacttagatgagaagtcagacatagctgggtttaaatctcaactctgctgcttaccagctctgtgacttaggcgtgttacttagcttctgtgcacctcccctttctgctccggaaatggagatcataattcctatctcagagaattttggaatttggataaggccagaatactcayatagctatgcctgtgattactaccgtgattgcagagctctcagcctgtcgtatctttaaggcccttgggaagggtcatctcaaggggttgagacatgtgamtggagagtacggactagaatagagcagctgcagttcccaagtgtcacctcctgttcccctctggcatccctggggtttttaaagaatcagaagctgggccaggtacggtggctcatgcctgtaatctcagcactttgggaggctgaggcgagtagattgcctgaggtcaggagttcgagaccagcctggctaacatggtgaaaccctgtctctactaaaaatacaaaaaattagccgggtgtggtggtcggcgcctgtaatcccggctactctggaggccgaggcaggagaattgcttgaacctgggaggcagagttgcaatgagccgagatcacgccactgcactccagcctgtgcaacaagagcgagacgctgtctcaaaaaaaaaaaaaaacaaaaaaaagaattagaagctgattcttagagcgtaccttcagcaggtggcctttctttaacgtagatctccttgttcacaaagatgccccatggcattgttcttccttatgcagactcaacgttggctggctgagatttattggggttaaagtgccccttcttttcacaaatgccatgggctggccagtgcctcttgatactgtctcctaacatgtggcagagaccatctgagtgaagggggcagatggctctgatggagtaaacatccttggactgcttggagctggagactaggctcgggtggggaacatggggagggtggcttagggtagcaaggaggagtgggcaggggtgtgggggtggatttcagaattggtgggattagaggagggtggccttgggtcttcagggtggggagagtttggccaaggtgaggagtacagagagggggacctgggcagggaccctagctgggctgggtgggtattgttgcaacagtgttggctgagaagagagtcaccctctattgtgctgctgaaggkgaattttttttttttttttttttttttttttttttttttgagacaaggtctcactgtcacccaggctgaagtacagtggcataatcacaattcactgcgacttcctcctcctgggctcaagcaatcctcccacctcagcctcctgcatagctgggactacaagcacatgccaccgtgtctgggttatttttgtatttttggtagagatgggatttcacaccatgttgcctaggctggtctcaaactcctgagctcaagcgattcaccagccttggcctcccaaagtgctgggattacaggagtgagccatggtgcccggccaggggtggatttttattgcagtaagttttgggggtkggggaggggggacacataagagccagagggccctggagagcatgggtttgtgggaagtgtctgcactgcacaggycagggcggcagccgctgtggacagagagggcaggcacctgctgagcaggtttcgtggttttcctacaacatgactcacctgcctttgaaaatatgtcaccaacttcctgattcacctgaagaaaattccacgagaactcagtgcctctggggttcaggtcttctggatttcctttaggaaaacaaagcctaccttcaaaacccccgtttctgatcagagcaggcagggatgtgcttactaagatgtatttctctacctccctgaacctcaaagagagggaccctgtctagggagggaagagaggcaggaacatggcatggagcctgccaaggtggactgtggggagtgaggacagtctagagtgtacagatgtctagagctaagcggcttagtccagccctgaggttgccattggacacaagcttgctgaggtgtcccagcttacggaggccaagccagcccgagcacaggttctcgtggtgccttgctgcctgcatgcatgctctctgctgggggattgcagggcctgcggggcctgccttcaggggaatcaaactcagaggaaaaaactgaccgtttctggctcagcctgaggaggctctgctaccttggttctgtaatttaaaatgaaattttctggccagcatggtggctcacgcctgtaatcccagcactttgggaggctgaggcaggtggatcacctgaggtcaggagttcgagaccagcctgaccaatatggtgaaaccctgtctctactaaaatacaaaaattagctgggtgtggtggcgggcacctgtagtcccagctactctggaggctgaggcacaagaattgcttgaacccgggaggggaagttgcagtgagccgaaagaaaaaaattttctgtaaagtgaagaaggatgctggttcctggggctgctctggggccagaccttaccctcctgctcggggccactgaaggcagagcagggcccgagactgggccttgtggtgttaccgctgccttgagagcaagagacagggctgacgtgcagaactaggcaggctccaggcaagcttggcgtcagcgctggcagccttggtggcgtgggcacaggtgacaggagcctggtgaagggggtgagcaaagcatccgggctactgagctgcatggccttgggcacttcagtgccctctctgggcctgggtgttttccttctagccctgctgagtgcgggcaggtgggctttacccctgagaccgctgtgtcttctaatgagaagccatccaatatgcttttacttggtttcttttctgtttttagttcttaatcttggtgttttctattataagaagaagattctgggactatggccgcattgccctggtgtcagaagcagacaggtaaagacatatcgcctaggctgtgagcatgygtgtgcgtacgtgtgagtgtgtatatgtgcgtgagtgtgtatatgtgygtgtgtgcatatatgtgtgtatagtgtgtgtgtgtgtgtccctggaatgggctaggggcttatgaagccctccatgtgggcaggacccacacatgacactgctatgagattgtgttcattaagtgtatctacctggcctgtaccaatagctgttctctttgctcttcaccacagacccatgaggtcagcctygctaccctcattgtgctcacaaaacaaaaaacaaaaacaaaaacccaggctcagatgytcagctccctcagggcttctgttgggccaaggctatgaaccttgttggcttcagactggttgctttagatactgagggctttcgtcatcctctgaagaggatgcccattttctttctcaccttgagtatttttaagtgatcatctttgaaattaattagcttggggccagggctgagtgaggatcaagggcagcagagccatcagggaactgccccaccctcctgccaggtcagcgccgggtttggatgagtctgttacaaagcacaggctccctcggccaggcttcaggtccttccagttctgcgtggggctccaggattctctgttcatgtcgcctgaagggtgacagtgaattctggatctgcacaacctgacgttccagctccagctggctgtttgcacccaggatcttgtgtcagatgtggtaataggaagtgagtgatgaaaactcagggactggccccagctgccacccagagccccagaggggctctggcagaccctccactctcgggcgcctcctgacatgtggcctgtgcggcagggtcctttgaactgggaagaggaggtgtacctgaaaatgcaccatcyttccccgtgatccctgctctgggatttgctaaagcctgaggtgatgatgaccttggactgttggagagaaacttttgggacatctgatgcctttacggcacattcagctggaagtggggccatgtactctggttgaaaagaccacctggggatcagagggccctgctgtatccctggctgtgcgaccttggtcaaggccccaaacttaatagggtcggtctccttctgtcctctcttccccatgaggtcacggtgaaggtcaaaagggacagtgtctctgcaaaggcttttaaagttaagtttcgtcatgtgttttgtctttagtaggggggcagtagaaccaggaataggagactagagaaaaggagtcacagccaggcatgttggctcacacctataatcccagcactttgggaggccgaggcgggggtggatcatgaggtcaggagttcaagaccagcctggccaagatgatgaaaccccatctctattaaaaatacaaaaattagccaggcatggtggcgggtgcctgtaagcccagctactcgggagactgaggcagagaattgcttgaacccgggtggcagagcttgcagtgagccaagatcaccccactgcacttccagcttgggtgacagagccagactctgtctcaaaaaaaaaaaaaaaaaaaaagaagaaaagcagtcacatatacgtattgcaaacacctcagatttatagcgcatggggtgtttttatgggggtactcgcaagaaaggatctgattaaaatgccacaatataaagtgccatcatttgtccactctaaaacatatgttttgacattttctcatctctgaaattggaaggcatcttgttattgatgggtggtcatagtttatttggcagcattttttctttagtgtttcataaaataattgtgcaaattacaaccagtggtatcttagatttgataaaatgtagtatttattccaagttttatttgataatatagggaaatatgctataaataggcaacactttgaagtcagtttagctagacgagtcacagtggtgtggtttctgggtgttgaccccttgctattcatcccgtataacatagagttttataccatgcctgggaatggtcattgtccttgtctctatctttcacagagtgagttatattttgtcccagccatcgagggctggtagctttggttctgagctccaagaggcagcaaaatactggatgtgatctttttgacttgtttggcttttttttttttctaagaattatctgtcattttttttctttttgtgtctctagcgagtccagatttcagagattgtcatcgacttcctcctcaggtcaacaagactttgaaaatgagctggttggtatctaaggcccagttgtggtcatggccagggggtggggactggcagtcatggttttggggagggagcagggcggatcttgagcggcaagtgctggagaaagtgcttttctgcatcgacgaaggcacctgaacttgggaaataccacaggagggatggcagctggatgacccgggaccttgagactggatgaatttgcaggcaggaaggggtacggaatcccttgggcttccccagcacttctctctcttacacctatggctttgtatgacagttaattatggacttgctggctggattatgagccagatgtgggcaggagccctgccctctccagccctgtttcccagcgcctgatgcatagtaggtgtttagtcattgttgaatgaattattgaacaaatatttgtctttcctagctggataacagcccagctttaggggtattaagtttaagagatgtgaaggacaataaaacctgcagacaccctttccccctaacacccactccagcggaccgtccaatccattaggcttgtttcctctcttttgcctcacctcttggtcagtgattgtaaacaatcaaacagcagcccacatcactttgcccagagctgccctgmgctttcatcagcttttgatctaagttttgtgatttgaccacgaagttgtcaggagattttagcaagagttccaggcatgtggtgtatattgtgaagtactgggctcatgcttgctgaatatgggataaaagcactgttttttatacaacaggaggttaaatggttatttaatgtcaaagacaatggttacatctgcctctcaaagacacaaatgttggaagctaatccctgttctctccgtttccagggatgctgtccctggctgactgccatcttccgtctgcagtgagtacacccgggggcagctgctggggggcctttgggctggtttttttgggtgtttggccagtcaagaggcaagagccaagatgcttgatcttaagatggtgtctcttagatactttttagttaatgtccaaagcastatgtgagggctgagaatcaaggtgaccaggcagcccctggggtcaggggcagaggaaggaggcctgtaggattggagcctccatgctggagggcacacagtscctgctggagcctggggcttcccaaattgagctggatcccaagagttcttgaagatagagatgaactttatttatttcaacatattcagtggaaatcatatgttcatctctcataatactgcacaaactaattaaagctatttttttgctttaattattcaacttaatatttaacaccaattagatgtcaatggacgctctcmtaggcaggtttgcatgtctttgaattagtgaaaagtgaagaaatataatacattcaattcatttggttacaagttttctttttttcaatggggcccatggagagaaagctaaaagattattaaaggtgattaagagccagttagttacctctcatgtggtgtagggagccaggaggcggsgggggcggggactgatgtgagtcttggttctcacctgctgccatattccattgaatctaaraagttattgttgtaagatgcatgttttttttttttttcagaccgagtttcgctcttgtcgcccaggctggagtgcaatggcacgatctcggctcaccgcagcctcygcctccygggttcaagcaattctcctgcctcagcctccagagtagctgagattacaggcatgcgccaccatgcccagctaatatttttgtatttttagtagagacagggtttctccatgttggtcacgyggatctccaactcccgacctcaggtgatctgcctgcctyggcctcccaaagtgctgggattataggcatgagccaccgcgcccggcccaggtgcatgttattttatatagcactaagaacaagaaaatgttgtcagctaagctaccatcaactataacgatagygtacacctcatttcagaggagttgaaatatggccggctgcggtggctgacgcctgtaatcccaacgctttgggaggctgaggcaggcagatcacgaggtcaggagttcaagaccagcctggccaacatggtgaaactccgtctctactaaaaatacaaaaattagccrggcttggtggcgggtgcctgtaatcccagctactcgggaggctgaggcaggagaatcgcttgaaaccggaaggcggaggtcgcagtgagccaagatcaccccactgcaactccagcctgagtgaaagagcaaaactgtctcaaaaaaaaaaaaaaaaaagaaaagaaaagaaaagaaatatgaaaatgatatcttagaattgatgaaatgtggtggttatataatgaaatatggtggttataaggatgaaatgttctgggcctcagttttcccaactgtaaaaggaggctgaggataacatatgctcagcctaattcaaaggaatgaatacatgtgagagcatgttgtaaatgttcggtttggtaggagttgttcccaggggaactggcaggagacagagccccatgggagacagtcaactctggtctggaacaggaggaagcaggaggcgagttagtttatttagaaatgagaacaatgtagttaattgcaaagctttgtcctctagataaatagtaatcaggactcatatgaacaggcatatttctgagcatctgctgataccacgtacaggactaggtgtttgatgcttattatctcttgagcccctgctaagcygatgaggtaggcagtgggcagtttccttgctcgaggtcagaggcgggtaagctccatgacctgccctcaggtggaggccgctgcgctggattacactgtggtctgactgcaaagcccacrctgacatctttcacatctgcctttttatgatgcagcccttgcccccctgagctcttcccaaagcactgctttcccagcctagaagtagcgccttcagggagtgggaaagagcagagtgccctgccccttctccctctgtagcacagaagtctggcttgtgtgaacctggaawtttctgagtccccagtggacccagagcctccaagtgtagcactccaagggtgggaaagggtggagcaagtcacctccccatctctggggacacagggaggaggccagggtggtaggatggactgggactcttggctccacctcaggtctccayctgagggggagacaggaaacaggtgggggcctggggcctgggcatattcccaactttattctttttttttttttcttttttgagatggagtctcactgtgtcacccaggctgaagttgcagtagtgggatctcgactcactgcaacctccacctcccaggttcaagcaattctcctgcctcagcctcctgagttgctgggattataggcatgtgccaccacacttggctaatttttttttttttttagtattttttagtagagacagtttcaccgtgttggccaggctggtctcgaactcctgacctcaggtgatccacctgcctcagcctcccaaagtgctgggattacaggtgtgagccactgcgcccagccctaactttattctgaatgtgatttcttagaagcaggacagggctgtgagatgactgtatttacgtacctttcccacacacgtaacttgggcacaaatgtttctagcaacatcagatggagtgctggtattcctttacctcgagtatggtacaggggctaagacgggctctggaatttatatcatgtgagatcctgaaagttatgcaaatttcctgtgcctttatttcctcatatgtgaacaaaaatgtggggatagcgatcgaaccatctcataagagtgtggtgaggatgatatgagacacttcatgcagagccccgaggcctgttccactgctcattaagattcctctgtgtcttggccagtgatgaccagatcctggaatggtgtggggaggacgccatccactacctgtccttccagaggcacatcatcttcctgttggtggtggtcagctttttgtccctgtgtgtcatcctgcctgtcaacctctcaggggayttgctgggtaatgaccctcctcacccttgtctatgttgtaatggggcagagtggcagtcctagggaaagggctcactgtggtagaccagaaccccaggagtcatgccccacttcagatgtaagatggtctcagggtgactctgaacatttctatctgattaaagatctggagcaaacctaggctaaaactggggccccaatatcaatgtctggttctatttaaatagggaaaaaagccccccaagatttacagaatcaggggctatcagagagtcttttatactttcctgccctcacccaaattaggaggtcacaattaatggacccagaagatatccatgatacttaattaaaatcagggtgtggcattatatctaagggcaactgcaagaatccaccttccaaaatgccaccatgaatccacttaggatacccagtggttcccaacgttggttttgtaacaacataggatgtttttagttttctcaaaacaaaatgaattcacattatgcctttacctgcaatggaaggttgagaagttatcagggagcattttggtttcaagcagaggccttgatggtgtagctctggaaagaccagtcagacgttgtcttcctgctggtccagacatgctcctcctccccagagctccacaaaccaaggctgattggttacgccccctcctgcttccccacatgaccctggaactaagtatctgtgcttytctgcagacaaagacccgtatagttttgggaggacaacaatagcaaacctacagactgagtgagtatggagcccgtggggataggtgctgatgggtgagatcaaggagaaggcaggtcaggagcccggggcaggccagaggtactccaaagggggcyggctggtatctgaaggccccttgcagctagtgwgttgttgagctgtgggcatgaacaygccacaggcagacactgttttgccagggttttaagaaacacggagggtcctgtggatctggagttcatttgtcaggacagggatggggacccctctgaagtattcactgtgggctgaggggtgctggccacacaacctctgtgggaggcatctcttgcagtgaagctgttggtcctcagttcagtgcccactgagggtaaccaggccccagctctgcacccscagctccctgcctgggatcccagccctgatggcaggtggtttccctctcagcaatgacctcctttggctgcacaccatctttgctgtcatttacctcttcytcactgtgggtttcatgcggcaccacactcagtccattaagtacaaagaggagaacctggtgagtgaggcgggacttagggacatgtgctgggagggactcaggtgggagtcggagtggaagggcctcccaggctctgccacaggccctgactgcaatgagctctgggagggcctcaggagccccgcttgcttattcttgctcacacttggcaccatctttaaaaaaaacagtttcctggtggattgtttcaagatttggacagttactggtgctaagtaaagaaatttgggttgagagcagccctttctctttgccgcccacagcttcacaggggaggggagcttctgtggcttggttccaggcctgggtcctcctctgatctgctgtgtgaccgcatttgagtcacttcccctctttctcagtctcctgccatgcaaagaaggctcatagagttgctttggaagtggattctttgtacagcctggaagaagacgctgtgtaaatgacatgctttgggggctccccyggccacagaaggagaaaactggagccttctgatttcctgttgtttactttccagaggctggagttgggtaggaaacctgagcataccggcacactggcttgtgggtgacttctctccctgctgtatttcccggacaggtgaggcggaccctgttcatcacaggactccccagagatgccaggaaggagactgtggagagccacttccggtaagcaggtggggtgggaggggagctgagccccctccacgtaggaccaacacagccccacccgcagggcgagcaccttaggtgagcgccttctgtctctcgcttgggtatccaggtgagatctgagaaggacctggccctgccacacgtgtatggagtggctcctgtgtgccagccctgctggtgctgtgcagtgaatagcgccctggtggcctatcctcttcaagcagcctgtgcacagtgtccagagcacagaccagggtgtaggtgcgaataaacgtcttgagagcatmcgggggaaaaaattgttgaccccggggttcttagcatcacctttgcagaataagagagacgtgagctgagcatttgtatggacccacagggctagggtctcacaggtggaaggacctcggggccatctctgcgtttgttcgtttgtccacccactgagcgggtgtctgttgagtgagcactgtgtctgagtccaggctctccctggtagaacctcctttccagcggctccctttgagtatctgcaccaccaattcctgcagatggaggctggaggaaagtctttcctgtgaggagattacgtgtgcagccagggatgcggggaaaggcccagagcatcaggaaaggtggcggtggggtgcaggggggcagggcaagcagtccgggaaggctcccaggaccccatgctggaggacctgaaggctgggctgaggagctgacattttattctttcttcattcctttttttgtaatcytatttttttagagacagggtcttgctctgttgcccaggctagagttcagtagtgcaataatagcttactgcggcctcaactcctggacttaaggcatcttcctgcctcagcctcccaagtagctgggactgcagacacatggcaccacacccagctaatttttaaattttttatggagatagagtcttgctatgttgcccaggctggtctcgaattgctgggctcaagtgatcctcctgccttgccctcccaaagtgctgggattacaggcgtgagccaccatgcccggcctctcttcattccttatcaatacagcagccactaatttgttgcatggactaggagttggctgcactttaactttgcactatttgtgaagaaagcacttgctaagcaaattgctagacaggatcgtaaactgaatgtttaaaatttgaaaaacttcttcagaaactctaagtattttagaaatatttactaatatgtaaatactcaataccagaatcatttttctgtatttccttgaagcaactcctcaaagttgcctgctaggcaacacctggaaacagtaattccacttaatgtataactttaaagagaaaaaaaaagtctcctcattctcatacaaacattgcatgactcatgctttcccctattttaagaggcctttttagtgaatgctgttgcagtccgtggggattgatgtatgaatttgcctttcaagcagggatgcttaaattgcagttttcttcctcacagctcttattgagaccagaaattgtcctactgtttaatttcatgattgatatacctatgggctgtctctctcactaaaatgtaagcacatccaggccctgttaccagcacctagaacagtgcctggcaggtggtaggtggggatttacatggttctggaatcccctggaattgtatgtataattttgcgtgtatggtgagggggtattgcatggtggccatgagcattgaccttggagccaggttgcctgtattcacctcctggctcagacactcactagctgtgtgatcttgggcacaagccacttacctctgtcggcctcagtttactcatctgtaaaatggggacaaaacctcacaggttatgatgaggattaaataaataaatatatgtaacaatacctggtcaatagtgagtatgtattttgctggtttttttttttttttttttttttttgagacggagtctcactctgttgcccaggctggagtgcagtggggcaatcttgctcactgcaacctctgcctcccaggttcaagtgattctcgtgccccagcctcccaagtagctggattacaggtgtgtgccaccacacctggctaatttttgtatttttagtagagacagcgtttcaccacattggccaggctggtcgcaaactcctgacctcaagtgatccacccggctcagcctcccgaagtgctgggattacaggcatgagccaccgcacctggccttgctggttgttaatatgtgtgtagatattttctggtctgagggtcctttgctttcattagaccctctgaaaggtctgtgaccttaaaaaaggctacctgaataggatttcagtgatggctcaaggtagatactgacctagcacaaacaataaatctgttcctttgggtctttagaggggatagtgatgtgttcatttttccccaggagaagtgccagctgattccaagccaagtgggtataaacttgtcagttccaggcagttagcttcatactactaaaaaaggctagcggggtgcagtgactcacgcctacaatcccagcactttgggagggtgagacaggaggagtgcttgaggccagaagttcgaaatcagcctgggcaacatagcgagaccccgtctctacaaaaaataaaaatcagcctggtggcatgtgcctgtagccccagctactcaggaggctgaggtgggaggattgattgagcccagaaggttgaggctrcagtgagccatgattgygccactgtacagcagcctgggtgacagagtgagaccctgtctctaaacaaaacaaaacaaaacaaaagccctctttgtattaaatttcaaaatttcccccttttggaggataaaagacaaagagaagagaggtctccgctggcacagaaaccagcagcgagatcactctgccatcctttcccttggatccgtgggcacgtctcctkcttggggtgttttcttttccaacggtgtcttttgcctccttctctccctggccacagggacgcgtatcccacgtgtgaggtggttgatgtgcagctgtgctacaacgtggccaaactgatctacctgtgcaaggagaagtgagtggtgggcgggccttgcaagatgccccctccttccttgctggcctcgcatctcccagctaggaagggaggcgggaggccctggacccctccttctcccctggcgttcgatggttgaactgtgggtatgggggtccctgccacaggattctaaatctgaggtttgtgcccccgctcccacccctacagaaagaagactgagaagagcctgacctattacacaaacctgcaggtgaagacaggccagcggaccctcatcaaccccaagccctgtggccagttttgctgctgtgaagtgctgggctgtgagtgggtaagggtcccaccccccggctgggagcagaggcattggcatcggggtgccccagataccagcatggggccacgtcatcccaatgggatgtgtcttgtggcaggaagacgccatctcttactacacacggatgaaggacaggctgctggagaggatcacagaggaagaacgccacgtccaggaccagcccctgggaatggccttcgtcaccttccaggagaagtccatggccacctagtgagtgtrggcacatccagaccccttcttggctgactccctgttcccctccagataactcactgtccctctcgagtggagatggtactgctgacccaccatccctgggatttatctgtggtgtttccttctcctccctcagctacccacactcactttcagccagcccagcccatgtttgtgtaacaggcggtgggggtgtgggcagcagccacggagtgggtgattctggctgaccccctcgagctgatgtggcctggccccactgcygggctcttccctgctgccctggacccatcctgttggcttcatgtgccagccttgccccaggggagatggaggcaccctcctttcagacatctgctctgggccacagatccttctgtctgtggctccccaccttcccacaaatgcaaagctgtggggaagacccctggggcacgctggggcgctcactgcagtggggagcttgaccctggggagtggcttttcacagtggcccttggcatgggactctaggctctcatgcctgtggtctcagtgtcatctcgccttaggagcagcacagggtgggtcgggagaggggtgtggaaaggtgtccagccaytgccccaggcattgtgacactaggaatggactcacacaggacttcctgcctccttgcagacactggggcaggaggaaaggggaaggcatctgaggcaggagtagaggggctgctgggctccttacgggaggttaaaggaggaaaagctgtgacctgttgagatggtgagggtcgaggtgggagccctgaggagggaagcttgggaacaggcaatgtgtaacgtggtctattgctacacttgggcctggggaaaaagtgacagaatgaaaagttgagccactggcctggcagtagcactgatcagagctccagcttaacaggcagggtggagggggatggccctatggaagagcagtgtgttgccctcagtttccttatctgtaaaatgggaatcgtactccctttgttgctggtggttgcgaggattaaacaaaattctccacacactgtgctagcgtggcacctcttacatagcgttactcataatacactaatcacaacaaagcaaaggtcctatgccactgcctcccactcctactcagtccccacttgccacatgtgtgcttggtaacctgagtagcctgggcctggctgttgctacatttccttgcagcatcctgaaagatttcaatgcctgcaagtgtcagagccttcagtgcaaaggtgagccccagccgtcctcccatagcagggagctctatacctccaagtggacagtcacctttgctgctgaccctgaggacatctgctggtaagctcctagaccaaggagaggtgggagagaggcctgggttcctggtgggagctgcccatcacctggagcacaggtgtgacctggcagtcaatggagatctccacacatctgcaattctgtgggctgtgatgctgtgatgtgctcggtgtggcccaactggggtatctgcccagcccttccctccagtgttcctccctagcattcaagtgctacccagcagaaatataatgccagttctgcatctaattttaaatttcctaatagccatgctaaaaaagtaaaaagaaacagttgaaattaattttaataatgtatctcgcccaatatatccaaactgttatttcaacatgcaatttttgaaaaatgtgagatgttttacattctctttttcacacttagtcttcaatatctggtgtgtattttacacttctagcacctctcaattcacaccagccacatttaaaatgctcagtagccgcatgcagcttgtgcagccttacttaggtccagtgtcagcctggggccgtgctggggagctgagctgtgtccatgggggccctggtgagcctccagtgctgtgctgagggtaagggcacccagcgcaagccccagcgcagctgcctgtccagccctgcctcagctccttgcacagaatgagcttgaagtgctcccctctgctcggttctagttctgcctctgacagttttgctctttggttcacaaggcttcctaaactcaggattgctttgtgggtctgttctttgggatgagaggccagggcaggtgcaagctatgccttcactcctttgtccctgccttcctccttcctgtaccccagctacagcccygttgggaagaatgtgtcgttagtcacaaagcattgcagatgtgtctaagaaatgccacgctggggccgggcgtggtgctcacacctgtaatcccagcacttcgagaggctgaggcaggcggattgcctgagctcaggatttcaagaccaccctgggtaacatggtgaaaccctgtctctactaaaaatacaaaaaaattagctgggtgtggtggtacacgcctatagtcccagctacatgggaggctgagcaggagaattgcttgaacctgggaggcagaggttgcagtgagccgagatcacaccactgcactctagcctgggtgactgagcaagactctgtctccaaaaaaaaaaaaacagaaaaagaaaaaataaatgccatgctggagccttgtttggcctgcttgggtgctcatgccatctctttgggtaggttctggcccccagactytagctggggagccacatctgagagaataattgttccctctgagctcttggggacctaagatttggtctttctgtagttgaaggtcagtgcagagaacttgcccccaggctagtctcttggtctgcctaaatctgaccttctgacccacctaagccacgagcactgggagacaagcctcgagacctgtatcccctctcccgctgcaggaagaacctctctatccagggcctccgctggtggctacagtggctgggcatcaacttcaccctcttcctggggctrtttttcctgaccacaccctccatcatcctgtccaccatggacaagtttaatgtcaccaaacccatccatgcgctgaatgtgagtaactgttctgcaaggcccctcccaggatagctggtgagaagagggcttggtgggtggggaaggagtggggacaggagtggggtgtgtgcggggaactaaaccagtgggtcatgttgctcagctcacatccttgcttttaagccctgagcaggcatggccacatttattacaaagtccttatagtaatgccatacacacacacacacacacacacacacacacacacacacacacattatatgtatatatacacacacatgcatacatatatattttaatagactatctaaatactgaatggtagggatcatttgagttgaatgtggtatattcaggttggtagactatcaagcatccattcaaaattgtatagattttgtggcacccatgcagggctcctgacagaagcagggatgtaccagtgaggcatgtctatcatggacactacggggaggggccaggaaggaaggaaaaaagcttcgttgattggggtggcaggatcacaaattatttcttttacattttggttgctaatgaccttgttataaaactattttggggccgggcacggtagctcacgcctgtaatcccagcattttgggaggccaaggtgggcggatcacctgaggtcaggagttcgagactagcctggccaacatggcacaaccccatctytactgaaaatacaaaaattagctgggcgtgttggtgggcgcttataatcccagatagtcaggaggctgaggcaggagaatcgcttgaaccgggaggtggaggttgcagtaagccgagattgcaccactgcactccagcctgggcgacaagagcgaaactccatctcaaaaaaaaaaaaaaaaamaaaaaaaaactattctgtataggtaatgaacgattttcaaaaatcttagatgaatcaatgagataacagccaaacactcactcaactggcatctactcaaaaagctattggtttctcatgattagctttgccaaaccatctccctagattatttttctttttaaatttcactttgcatttggttaatcattccctgggaaagcacacggggcaggtgggcctccttgtcttcactttgccattccctatctgatgaattctgaacctcagtttttcatccaagaactggagttaaaacacctgcactattatacagggcgtgaggctgttgtcatgataatcaatgagctgatgtgtggttgaagctcttatctgactccatagatagttttaaactacctaagtataaattcagcagctttgcttaagatttaaagcaggtattataaatatgcattcctttgccaatcttttaatagaaggacaggcctattcttttgaagatggatctgctgatgagagctcccctttgtctactttacatcaaccacacccttatttcattgttttgtgattccagtgttggtttctttaaagtaaaggaagaatttagatatttgccgagccattctgaatatagaaacttcctagatcgcatatcccttgatcttttatcgttaatttactctcatctaattaacagcgttttgtttttttttttagaaattgacttttattaagtctttccaaagtagccaacttagttttcaaagaaaatttctctctatttttatgttcatctaatcagtgacagtaataagtcaatcagctcatgtaatcccagtaacaaacagcaggattgtggacacacacagtggagccctgatatgctgcagctggacagtgggagctgagcaggcagggcacccccccccmyrcccgccggccaggactccaggccttcggtgttcagtcttgccatggcatcagtcattggttttgtatagggagcagagaaggttatttaatctggttagtcagataagtggagtttactcgtatgtgaaattgctttctttgctgtgctgtgaggagctgtacaaatataaggtgctgttactgattattcagccaacatttatggactaccaactctgtacctggcacagttttggttctggggtcagagatgacaaactcctaccctgggagtccactgagcgaccataccaataggtcatggcctcagagccgygtggcccacggcccctgtgactctctctgctgtggacctttctcctagaacccgatcatcagccagttcttccccaccctcctgctctggtccttctcggccctgctcccctccattgtctactactctacactgctggagtctcactggaccaagtgagtgcccgggagccccraggccctgcccctaagaaggatatctctgaccgctcccttgtccacaccctaaccccccagctgctcaggcagtgggcacatggcaggggcctcactgggggcacatagagcatttgggggactgcgagtgctcacctttgacttcctgcaggtcgggggaaaaccagatcatgatgaccaaagtctacatattcttgatcttcatggtgctgatcctgccctccctgggtctcaccaggtatatgccaccaccttctgctctaaattcagaataagagtcacatcaggagagcactgtccccaggagaatgcaaacggtttggcagcagaagcaaacctctaacaatatctaagcctgtcgcaaccactcggcgtgcagtagggctgggtcattgattcttctggcaatatgattgattgttcttctttaaaaaagaaaaaaacaccatattggtcaggctgttcttgagctcctgacctcaggtgatccacccgcctcggcctcccaaagtgctgggattacaggcgtgagactctgtctcaaaaaaaaaaaaaaaaaaaaccagcttgaaaattttgtggccaggcacagtggctcacgcctgtaatcctagcattttgggaggccgaggtgggcagattgcttgagcccaggagttccagcctgggcagtctggcgaaaccccatctctacaaaagagaaaagaaaatgaaacttatcaaggaccttccacttagggaaggcctcatcatggctttatttatctcaaggaaggaagtttctgttaaagcagactgtgacaggtcatgccgtagtaagtggcatygttgagaacaaaagtcaatctcgagctttggcctgtttttagagcaaaagaaaatgaaagcatgtgtagtgacaatatggaatgctggaaataaactcttagggggttcctttgtttttcagtctagattttttcttccggtggctctttgacaaaacttcctcggaggcctccatcaggttggagtgagtattgccaagttgagttctggagccatggccctgggtgaaagtcccacaggggctggggctgcagtgggatgggtgggggcggtcgtagcctatgcttcygaacaggcatcttcctccccagacagcagggcttggggcctcacctccaccctgccaggtttctggtagacactgtgggagctgacccactttgtgctatgcttgcagaaatgtggttaattttttaggccagaactcaattagcagctgtctcattcattgaaacttactgagcacagagtcacatggggagaaggaattgctgggtctcagtggtgccagggagtggggaaaggagaataataattaaagatggcagccaggatgcctctgggctctggggattatttttgccagaatagaattaaatttattactgatgtatccttgttagtattttaaacttataccatgccacttaatagtaatagctattgtttaagaaggcactatgctaaatgctttatgcatctttttctcactgtatctttacaatgagctatgaggaagatactattattctctccattttacagatgaggagactgaggtttggagacgttgaataacttgcccaagtttatccagctggttaaggaacagagctgggattcaaccccagcccctacagactatacattaggtcttaatataggtccagaggcttggcattgactttcctaaaagaatgtgcttacctgtaaggatggggcgagttattttaaatgagttcttgctgagtaagctgatgagttgggagctgatgactgtgacagacacacatacatacagccagcaatagtctaggttgacagtgactttcagattgacaagtccagtgaccagctcaatcctcatcttatgatctatcagcgacatctgacacatttatccgagccttcctcctcgaagctcggccttgggtctctcatctcgcagcatcctcttgtcaccctccttggtgggttctctcccatctccccaactctagattttggctgcctgaaggctcagcccccagttctgggtccacactgcctctctaggtgacttcagctgaacccacggcttccatgccatgatactgctcctgaattaacttatgcggacaacatccacatttatgcctctagcctgcacctccaggctggtaacccaactgcccacctcaaactctagctggagttttactgggtaccacggatgttacctgcccaaaaccaaactctcgacttttaccctcaaatctgctactctacaactttccccattccatattgtttttctacttgttttggcaaaaaacctcaaagttcaccttgtttcctttctatccctcccatgccatacccagcctaccagaaaatcctgacaactctctctaaagtagatccagaatcccttcatatctcaccacctccatcacaaccgccctcatcccacatggggatgacacagtggccatctgtgtagtctccctgaccccattggaacagatcccttgtcctgggctggcccccagcccctttcagccttgtcttctgcctcccctcgcccactgctgtccagcccctggatgtgcagcagacgaggacatcctcaggtgtcttgtatgttgttccctttccctggaatcctgtcttcccaggtttggggatgacttgctccttcacctcttcacgaatatcacctcgttagaaaggctcctccaacccctgtatgacataggaaccctccctgctttgttttcctctagtgctcaccgtccccagcagatggaatatttgtttgtctgcttgtttgtgcccccagctagaatgtgaacttcaagagagtggcgcaggggctttgttctattctcagtgcctagaaaggtgcttggcacacagatgtgtttcccaaatatgtgctgaatgaacggaagagtatacagccctcccaggggctttctgctcctgcccagcctaggggcccctcctctccctccaagagcggctctcagctcacagacctgggccctggtttccccaggtgygtcttcctgcctgaccagggtgccttctttgtgaactatgtcatcgcctcrgccttcatcggcaatggcatggagctgctgcggctgccaggtctcatcctctataccttccgcatgatcatggccaagacggctgctgaccgcaggaatgtcaagcaggtgccatcccctgggcccagggctgtgcctctgactccctcccatgtcccccttcactgacccgagggcctctcacccccactacccccactagtgggtagcatttacctgactacccactagtgcaggcactgggctaagtgcttctcaaacccgggtccaggcaggcgtggcctcctccagcctcctctctagctcacaggctggaggagagagcttgggactttggcatttgaaacggtttgatcgcacacatacatacatacaactcaaaccaacagactctttttctgtaggcacccatttgcataaattcttagccaaaccccagatgtcaaaggcattttcggcttgtggcatttattccaggattccctgaactggagggtgtggctttctcttttattctcctctgccatggtgggcactgtgcgaggaaagtgggagaagtgctgcattccttcatttcattctcagcccccttatgagctgggcactgctagtatcccgatttcacagaggcatgaactaagctggcccaggatcccctgctagaagggctggagtcactctacacctcttccctgaccacctcttccctccaggggctcacatgcctgttgggtggaacgaagggagcackagcaaacacgcatcaccatgcctcgggagggctgggtgcactgagtgaagcarggcargctgggagggatgggaaggaccttgggaggcggggagccacgcatctcctatttccaaagtcctcctccaccctgctctcccatcaccacttagagagcacaraagggtgtttgaggtggaacaagtccatgagctcctcaccacctcctcctcccagaaccaggccttccagtacgagtttggagccatgtatgcatggatgctgtgtgtcttcactgtcatcrtggcctacagcatcacttgtcccatcatcgcgccatttggtgagtggccctggagcctgtcccagggtacatgggtacatggacggctgattgcaccaaacctctcggggacagctatcaccagggcacaatggagttcccaaaaccacagccacaagagccacaagctgctaaagactcacgtgacaccagatttcactcatttctttctttttttgttttgagacagggtctcatgctgatgcccaggctggagtggcatgatcttggcttactgcaaccccyacctcctgggctcaagccatcctcccatctcagcctcctgagtagctgggattacaggtgcccgccaccatgcctgcctaactttttgtatttttagtagagatggggtttcaccatgttggccagcctggtcttgaactcctgacctcaggtgatccacccgcctcagcctcccaaagtgctgggattataggcatgagccacagcacccggcctcattcatttttaaatgaattcctcccactggccctcagctaggacctctcttagtatttctggtctgaggttctctgcccactgactatgtcgttcatggttgatttctttagcagcaagtaagacagtgccagagtcacaatcaaagctctcgtgctgctttcactctggcagatgcctgcctccacgtggattaccacatttctcacctcatcctacaaggcagttcctgtttctattcccccttcacacaaaataacttcgtatgttgttagtaagcaggagaaccagcctttgaactcaggactgtttaaagaccaaggtcctggccactgaaataaaacatctgcaactggcagattaatgaaaggctctagaaggaaacaaaaaacccaagagactgctggcagtgatagctgagttttagggggaaaagttgttttagttttccctgtatactttcttgtgtagttttaaaaatctacagtatttacactttcaaaacaaaatttattttttaaaaaagaacctggggctgggcacgatggcttatgcctgtaatcccagcactttgggaggcctaggcagtgcatcacctgaggtcaaaagttcaagaacaacctggccaatatgatgaaaccctgtccctactaaaaatacaaaaattaactgggcatggtggcaggcgcctgtaatcccagctactcgggaggctgaggtaggagaatcacttgaactcaggaggcagaggttgcagtgagccaagattgcaccagtgcactccagcctgaccaatgagcgagactccatctcaaaaaaaataaaaaataaaaaaacaaaagaacctggcataatagaaaaggcagcacccactttctgttggtcccctgtgtgctcctgtgccacccctggggtaagacccttgggcctcattctctgttgactgtgatgagggcagggatcagccgggtgggagaaggccaggggtgtgggagcactgacatacaggggctcagcatgggaagggctggggaggaattgaggccaggcatccaactgtgaaacagcctctttccaagatgattctggaatgttagtgttctgtggggacaggatcacagacactgtgactcccttggtgcagggtctgtcccacagaccctgacccagcgacggatgaaagacatacactgccgggtgcggtggctctcgcctgtaatcccagcactttgggaggcaaaggtgggcggatcacgaggtcaggagatcgagaccatcctggttaacawggtgaaaccctatctctactaaaaatataaaaaattagccgggcatggtgtcaggcgcccgtagtcccagctacttgagaggctgaggcagaagaatggcatgaacycaggaggcggagcttgcagtgagccgagatcgcaccactgcactccagcctgggcaacagagactctgtctcaaaaaaacagacagacagacatacactgacagatattttgcctgtcagtgcggctaaggggctctgcagcctgagtctgcagtgtagtcctcaatgccaggcgaagttcgcatttatttagtacagactaaatgacaaaggtctcgagtaaacaccactagagggtaattaacattgccgaccccctgaatagcgagcaatcatgcaccagtggatgatcaaaggttggtcttaggaccacatgagkaaacaagctatttaggtaaactcccccacattcctatgtatctgcaccctaagcttttaagagaattcagctgccttcagccaaaccctttactgaagctatgcaaacctctcggctttccaagaaggtttgtgtctatttcctataactttatcttaaattttctcccaccaccctgaccgatcccctacaccttggggtcacagataagtgaggaagtgggtaggagagagaaagtgaaaaaaaactagtagccagaggtgcaggatgcctcattttgtgttcaggcagtagagcagcagccccagccctggctccttgccaaaatagccgccccggagaggaagaggacagaggtgtctgtgtggccctgcgaggtctccagctcacagccccatcccctgcaggcctcatctacatcctgctcaagcacatggtggaccggcacaacctctacttcgtctacctcccagccaagctggagaaggggatccactttgccgctgtgaaccaggccttggcagcccccatcctgtgcctcttctggctctacttcttttccttcctgcgcctgggtgagcagcccttctgacctggggccagcccttggcctcccagccctgcatccccaccagccagtcagatccctcattgctttcacagcatcagcatggcatccagtcagaatgtggtgcccagagtgagggctggttaggtgtcccatcagaacgtggtacccagaatgagggttggttacatgtctagtcagaatgtggtgcccagagtgaggactggttaggtgtccaatcaaaacatgatacccagggtgaggggctggttgggtgtggtgttgacagcctggctcctaasctagcccgagtgcaggtgtaacccttgtgaaggcctggtcaattgtcccatacatccctggagagaagatagtgcctttatcagctgtgcagggactgaaccagaggaaatggggaagctgatccagatttgccctttgaggctggtggttgggcccagctccttgtacctcctggcatggaagaggtggggacgtggaggagagaaaactgacactcctgggggaaagacacgtctgccccggtcagactgggggtgtgggagggtccatcctctctagcccagggcactggagactggagggaacggaccagcaaggaggctgaagaattgccattgacttggcaccccagtgcctgaaatctgaccagggatgatgccagtcattcagtgggtccctctgtgtgttcctggctgtgaagacaccatccttgctgctggagttgaggggtgggggtggggggttaggccttrcctttattttctgcctgagggagaagtcacgggcagtttccacaccaggtgcggccccttcctcagcagggtgagggtaggtggtggcccctccctgcccaccccaaggctagccaccctctatcaccaggtatgaaggcccccgccactctgttcaccttcctggtgctgctgctcaccatcctggtctgcctggctcacacctgctttggatgcttcaagcacctcagccctctgaactacaaagtaaaggcccccgaccccactgcccggtcaagccctgggaggaacagatggtgggacgggctcgctgtcaaccccgcccacccttgtctgtatcaacacagcagcagccttctccagattctgcttctccatgggaaaggcgtgggtggttgggtgccatgtgtagcttcccttcctcccctcatccctgcactcccccaccccatcctctctcgggctgctggggagcttggtgccagctggtactattattccgggtgttaatagtctgtgtgtttggagggtgttygttcacagagatcagttttgtttatcatcgcaagtttttgctgttatctgcagacagaagagcctgcaagtgacaaaggaagtgaggcagaggcccacatgcccccaccgttcacagtaagctgtgcccctcagcctctgagcttgtcgcccttttttttgctttggttgtaacagtcccaaccagatgggccccggcaaatctttgatcatctcttgctaagatcacatggcaggcaagtttgtgaattaatggcagagaaggaatcctggtccccctgggtattttaacctgcatatttgaaactgttgaggagatagagtcttgtctcgattcatggccatcccccttggtttcagttccctgctctctttccttctctgcatatttaatgcctggtgagtttggggctttagtgaaggcacatggtaaggcgctagggtttgacaaaggtttgtcatcagcgatgcacctgcctgtgcgaggtcctccactaggctccaagagggtgtcaggcagacttccctttgaattcaagaaatgaacattgcacctgcttcagaggaagaccccatggtagagagacacagggctccttgccttcctagttctctctgcacacagcctccagggtcctgctcctagggtggggctgggaagggaaagcagagccccagggttccagagctgtagtcaccagccttcctgacagccgtggccaggacagagccgacctcatctgcagggttctttctggtggctgcctcccaggtgtcaggctctcttatcggtgtctgtccttggacaagttccaaacaagggagggcctcagaaggactcattacccagcgacacacctgtggctatgctggccaagcagggaacatgcaggacaggtggatgatgtcaagccctcacagccagggtctcaggaggagtatggcagggctctgtgcctggggtcagtggctggagcctgggattgggaggaaatgagactcaaaatgagactcacacagwtatgttgagcatcccaggggtcccagggcagcgttctaagcccccctatataggtagacttgtttcttctacaaagtgagaaatcctcctaggatccagggctaggaagtttagtttcctctgagaactgctctcttgtgcttccttctgtgatcatgagaactgtataactgtgctttctcttttgccctggctgctaggaaattctgcaggtgtcatattttcggtcttaatgtcctaaatggatgtcggtgtttcttcatatgtcctttatggccactgtctgtgtcctgttgggagaagggcaggaggggagggatgcagtgtggaagctcatssctgtccaggccaagcacaaatccatttgctgacagccctaygtgcctcggattctgaacggcttggcctcggagaggacagcactgtctccgcagcagcagcagcagcagacctatggtgccatccacaacatcagcgggactatccctggacagtgcttggcgcagagcgccacrggcagtgtggctgctgccccccaggaggcctgaggctgggtgagctgctggctgggccaggctcaggggagcctgtggggtgagaagacaggtgaagcggcctgactcccaagttcatgacttcttcccatctgttttaggtctcactgctctgaaaagacacaaccagaatggcctggggctcaggcccttggctgagtgggaatgcgttgggactgcccagctgagctatcaggtgcccatcttttctggtcccagcagtggtgaggagagcacaggcaggcctcgcccctcccttgctcacccagtttcccctccggcacaagcttccagctctgcagctggggtgacatccccagtggtttgtcgccaagaccatgtggtggacttttcgccccccaaactgatgagtccgggagaatatatggagagagagatgtaacaaggggaaggcctcctcccttctgagcacacacacaaccgataaccaaagagatgctgcagtccaggtctgaggtcccgctggcatccagctccctgctccatggccagtccctccccagcccagcagtccctccaggctacatccaggagtaagctatggggaacaggttgggaggtggccagtgctcctgccagctgtgcacacatctctgtatcccgctagagttctgtgtttttgtatcatgttgtcagggacgctagctgggtcagggttaccccatagcaggcagggacaaggaccactcataatatgcccattggaccacagttaagatccagcctctctcacctcttcagggcygagtgcatgagtctgcacctccaggcaggctctgtgcagtactcaccccctccgtctgctccctccaaggtgtgggggtgggcagtgctcagggcctcctcggagccaaaggacagcatggtcggcacagaggaaggggtacctgggctgggtgcagggccatcccactgcccktgagctgtggctctggcaggaaggaggggcagcccatccctcttctccctcctggggattctggggaatgggatgcaacttaagacttctgcctgagaagcctcctccctgctgcctccagggggcaccaaggcacaagcctgtgcagtwggggcgggatgggggtgtggaagagcaggtccaggctcctagcacaactggcctggggccttggcacctctgtaggccctgcctgtgcctgtccgctggcctggggggcctgggcttatctgggccttctcactcagggactctcttgacgctgacttgcccccgcagyggtggccagtgctgcctctgctccaagctgcccctgcgctgggaggggtgggggcggtgccattggtctggtgcagcatagccctggccagtggcctcatccccagcaggcctcccgtgcctctgccagcaaggaggggccggccagctctgcttgcacagggggccccatgtggggtcagcgcacgctcatgtcactgagttccagccgcttttagagtaaagtcgtttatcatcaaagccatgttgcttaccacacggagttgggggttggggagtgagcttggaggggtgagggggtgagcgtgggctcccagcatgggcaggggacggaggcaaactcattcctcagaaaaggggtatcttccccaagaaaagcctggagggcacttgtggggggaggtggcaggcggggggagaggggtgggtcattgcygctccagcaccgacaggaacttgcggatgtcctgggcgagcagctccggctcctcaaaggccgcaaagtggcccccacgaaccatgtaggaataggagatgagctttgggtacttgaacctcacccacttttcaggcgtgtgcartagctcaaaagggaaggcagagaagccagtgggcacatagaccttcatcctggaagtgaaagagccgacggaggggtgaggctgtggccctgcgcccctccgtcctgcacagcagggggttaaagcgcctgggggtgagatcagctggcccacccacaaggagccataaagaaaaggacaaatccagggtctcaaccgctctcccctcactgagggccttctcttttctgggagggccacccaggcaggggcatgggacagcctctaaatccccacctttgagggtttccatgtgagacttggaaatcccagaaccatcagtgccactccagaccagcatcctagactggggagcggtactgagggccgcccgggagccaggcacctggtccctccatgagggctttctccaaacacctcgacctttagtgttcccatccaagggcccctggggcacytgcaggcaaggctatacttatcccaccaccaagtgcccttcgtggagcccaagactggccgtccccctgcctccagcctcagaggcccctgttctcggctcagccaggctcaccgctcwtgcttctgggtcatccagccctgtcccaggttctccttgkagaagcgctgggaggagatgatggtgcctgttgtccagtagagcatgacrttggtcagcaggtcgtccagggagaacttcctgggaacgcagaacacaaagccccactctcagtgccacatgcagttgtgtgacaaagggcagccagaaagtcctacaaatgccaggccctgcccatgcggcttccctcctcagacctcatgcaacgtgtgtggtatcctcgtgtcacaggcaggctgcgcccagggcactagactggagcgcatggatttagttgaagtgtctcttatcaccccaaggtcctccccccacccaccttgcctctacacacctgtcccctctctcctgccactgacctctcctccctcccctcaacccctgcaccgtgaaactgctcagggcaccagctactgtggtgaccacataccaggcagcatgttctaagctccttaccttcttttaattcatgttttcctctcaacagcctatgggacataggtactattatctccattttacttattaagtggagaatccaaacctagccagcttgggtccaggatgcatactccacagcccccaccccaccttccactttccccagagcacgccctcccaaccctaccttcctcactcaaaccctgaatctctagcaacagcagcagggagcagggacagagataaagggaacagccttttcaatgtgattttggtggcaaaatgaaaactggtcaatgaaaactagttccagtatacacatcacctctgtgaactggatttctgcaagttggccaagtgcttccatctccctttcrgctctgcccgcagcttgaaaacgaccacgaccaccatttccaccctagtgtattcctgttctttctagaacacagatctgatcctgtctacctcctgctcagggatttggtgctccctgtaacccggggccagagctgcaggagtggcctagtgggatagtctggtggggcctcacatcttgctccaggtatccgtgtgcaaggagcaggccagaccccctgccaaggtggtcttgcagaagctccatcaacccctgtgtcctgctgaatgtagggcaggggaaacagatcccagacgaaggccctgctgaggctcttggaggaggtgaggacctgcctgcaggaatgagtttgcttttgatctggccccagtgtacctgcttcagcctctggacaagccaccctttccaagcaccctttccttgcatttttattgcttttctctttgcctaagtttctctcctccatccagcaaactcctacttatcctccaaggcccaaatcagatacattctcctggtcatttcccctctctgccgcttagacaaagaatcctccttccactggactctcacagtcctttgcgcattcattcaacatctatgtactgggctctcccactgttcacccggcattgttctaggtgatggggctacagcatggccaagacagagtccctacccccaaggcaggattcagtctcattttactgtctttcccatccccagcactgtctggtcctgtgtgtcactgaaggaataaagggatgggccctggaaagggtgggtcagagctgaccttggtgaagcctgagtcaggccacagagctgggagtcaggcatgtagaggatacagcctctaaggctctgagagattaacagcctcctgtctttctgcgaccaccctcctggaacacgcagtcacgtgaccctgatgccaggctctccagggaatcaggaggaaaagcccaggtgctcttgacaataatgtggtgcctgctgccctgtgggctccctaatccccagaggggcctgttcagcaaaaggagcacaagcaggtgagcctgcatcctagtcttgaccatgcactgtgaggctgggaacaacccaccaggccacctcacccaaaaaatgcagctacgttggtcacagggtgaggatttgtaagaaagccaacaatagaatttgctgagtgccccatgcagagcaaccagacaaggggatgaagagggtgaggaggttggctgctgggaccagggtcatgactgcaggggcaaaccagggcctcacctttccaggcctccatcctccaggtatcggaattccgtattggtccaggtggaaaacttctctagaatataggcagccagacccacaggagagtcattcagagcagagcctggcggggagcggggagcaagggagagactcaggcctggggaccagagagctggagcttcaggtgtgatgtgtggcactggccgcagagggcggggctgtgtgcaggaagccacgttcgagcacaggcctgccttaactcctgggtgctcacatgcctcgcttccttaactctgcctcggcatcctcatctgataaacagggacgataccttcccactgtctcccagggcctggcacactgcctgctcagcttccttcaaactgaagggcctacgcctctgcatttggtggggtcccaatgagaagtgctgtttttaaaaaggcggggtttttcagtctatgtgctctgattcatgaaaaatgagaagccacctaaaaaagtctaaaataggggatcagttacaaatattgatatactcmtaagccaaaatactgtmcagtcattaaaaatggctggaacaggctgggggcattggctcatgcctgtaatcccagcactttgggagggygagaaaggtggatcacctgcggtaaggagttcgagactatcctggctgacatggtgaaaccccatctctattaaaaatacaaaaaaattagcagggcatggtggtgcatgcctgtaatcccagctacttgggaggctgaggcaggcaaattgcttgaacccgggaggtggaggttgcagtgagccgagatcgtaccactgcactctagcctgggcaacagagcaagactctgtctcaaaaaaaaaaaaaaaaaaggctgggacagtgggacaggctgggtgcggtggctcacacctgtaatcccagcactttgggaggccgaggcgggtggatcacctgaggtcaggagttcgagaccagcctggccaacatggtaaaaccccgtctctactaaaaatacaaaacattagccaggcatggtggcaggtgcctgtaatcccagctacttgggaggctgaggcaggagaattgcttgaacctgggaggcggaggttgcagtgagctgagatcacaccactgcactctaccctgggcaacagagccagactgggtcttgagaaaaaataaataaataaagctgggacaatggcataaatgaatctcacaaacataatattgagcaaaagaagccagactcaagggtatatactctgtgattctattcataggacttaaacaggcacaatcaaaaccatctcagtcagaagtcagagcgtggtacctgggagagaaccccgaggggcatctggagtgttggggccatgttggtgakatggacgtacttcacttgtgaaaattctcaccaaaatgttcacaagttcttttgaaggagargggatgtggggagggagaagaggttatatgagattgtctttaatgttttgtactttttgcatttttaagctttttgacaacatgtattttataatcagagaaaaatgctgacttttataaagtgccattattatgattatgagctgcctcgtgtgtgtgggcatgggtttgccatgaaaactatgaagaactttgagatgggcaagacaattcctgggtgtcttctggacaagatctagggagttacctagcagaccttccggactgacgtgatgctacaggggtcccatctttccttgtcattgagctattttacagttctgtgaattgtaaagaactgagggtaatgcgaatgactcttgttcatagaggcaaatgaattttgtcccatggagatttaattgatattactctgtggatgttgacaagttttgtgtctgttagcaaattaatttcagtgttcttatttgtctttgaattgtttctttttaaaattttactggttcctttataaatttacctttttgaaaaagtattgtcctttaacaggaccctggtggcagacatggttgctgggccctccctcactgcctgggaacctcttccccaaggccccagggcaccctctcccctctcccctgcagccccagagctgcccactcccaggattcctcctacctcaccccctccatccctctgcttctcagtgtaggatatagactcaggggtgggagatcaggggtgaaagccactatgaatactgagtcggctaaacagagttgctaaattggcctgggaatctgctgagggtccatcctcttgattctatgggaaaatgcagtttaaagatctaaagagctgggaggtccttacaagaggcttccttctgtgggcagcattggggtggggtggtgaggttaccccgcgggtgtctccctgccccagtggagccggcagtgggcgaggacccctgagcacactcacctacggtgtcaggcttggtgcactggatgtgcatgtagccgctctccctcatcaggctgtaraataccttctccttgacrgggtacagcagctccacatccctctcagtgaggccaagaaacctcccgaaacgctgtcccaggaggagggtcagggtagagaagttgctyaaaaccaaagccatgttcaartgcaggcctttcacgtggctgaaggcagagagaggggccggggtgaggctgggctggtgtcaaggacagggagagaggagagatggcggaggaacaggcctcagggctgaggagcgagcacagagccagcctctttcagcactggccccactggggaggccatgggagttggagaagggaggttgggggaaaaatacagtttctggggagttctgctcagggctgtcccagagcttggtccagcagagaggtctaatgcctgaccttcccctcctatcacaggccttctctgcctgggaacctgacccagagccgcaaccctgggttacagacaggaggatccaagtcaacgtgcctcaggcactgctgagtgacaggtcacactccctcctctcccctggggggtccttggcccaccctgcacacaggtccacttcttagaggacacacacacacacacacacacacacacacacacaccaccccaacagtgacctcacctgggcaccagctgggccatattagtgcagatcagggacccccagtcccctccttgaatgtagaattcctggaagcccagccgcagcatcagcttgtaaaagatcctggcggtggccaccgagttgaaccctggcagtgatggggaaaggcatggagtcacggagtcacaggcagattgctccttgggccctctggtgttctatgaaatttctcaggcccgcctacccccaggtggaggtcagaaaagctcacagaggcaagaaggaatcctggagcccaaatataggggtggcatctccagccccggagggcggtgtgtctggggccggcctctcaggcccctcctttcccagcttcctcgggccaactccctgctcaccccgcyggaaggagagcctggtgggaacaccgggcccacccttggcgaggacggggcagttatggaacctctagcagccccgtacccttcttggaggatgcctctgagaagccatagccagggatggaagggcagatgacttcaaaaacgtgctcatcgctcaggccatggttcttggggtcagtcaggagtgggatgatcttataaaactcgtagaaagagccgggccagccgtgcaccatcagcaagggcttcggggtatggcctgcgggcagctgggggggcttcacgtggatgaagtggatgtccagccctggggggacagagcacagtcagggtggagggagagagaagaccctgcacggtcaggctctggcaccccccagagcctagatattgagtcctgccacccttagtgcccccgccsccccttcatggtattgacagtaataagggctgacactggtttcacactcacactgtgctccaggtgcacagatgtcctcactcagccttcacaacctccctgcaagggagctacgattattgcctcccggtttccttagaggtgccccctgacagctgggccaggtctgtacagccactgctgggtttccagggctcaggacagctcctggctcacagcaggcctccataaatacttgttcaataatttaaaatctggagggtagggagaaagccccacgtatccagcaatacaggattaatcaagtatagtttgacagtatactggagtccagtacagtcatctaaactgacaaggtagatgtatatttatttaacatagaaaactgatcagaagatattgctgggaggtaaaagcaaatgatcaagtcatatccattgtgtgacccagtttttataaaaagtcatctatgcttatactgtacttataccatgtattggtgaattttaaaagtctgggaggataaactccaagaatgtaaaaagcagttctcctgagcagtagattccagtgcttttaatttctctttgagttttatgtactttccaatttttctacaatgaacaggtattaaatgcataatttttttcatacacattgacaaaatgtcacctttttctgattaccaaatgatattttctttaaagtggaggatttttgggcctggtgtggtggctcacgcctgtaaycccagcactttggaaggctgaggcgggtggatcacctaaggtcaggagctcaagaccagcctggccaacatggtgaaaccccgtctctactaaaaatacaaaaaaattacccgggcatgctgacaggcgcctgcaattccagctactcgggaggctgaggcaagagaatcgcttgaacctgggaagcagaggttgcactgagccgagatcacaccaccacactccagcctgggcaacagagcaagactccatctcaaaaaattaaaataaaataaagtggaagatttttttttaagtgcaatgctgaaaacatcatcatagccaagggcaggtgaatggattcttgtctcctctggactgacttggggcctctgcatatcaaaagaaggcagccccttcccaggccagtgccctggacagcacctggggccttacggcattcacagtgagggcggctgccatgcttggaactctctgccaccagggctggtgcagtcagcatggtctagctaatgttctgttctgtcgttaatatattatacaaataatacatgtttactgtagaaaacttagaaaacacagataagccaaagggggaagactcacatgtaatcccactctctaaagaaaacatggtgttgtctgtctaaactttattttggaacagttttagattgctgaaaaactgcaaagagtccagaaaactcccatatacctcacacccaccgggtttcctccattattaatattttatgttagcatggtacatttattacaattaacgaaccagactgagatattattaactataaagtccattgatttccttagtgtttacactttttattatatggcgagaacacttaatatgggtcctacccttttaacagattgtaagtgtccaacactgacggcgctctgctgtacagcccatctctaggatgtattcggctggcaggactcaaactttacacagcaacgatcagcaatgccgtttcccctattccccagcccctgacaaccacccttctcctctctgcttctgctgagtttgactatttcagattccttctataggtggaatcatgcggtatttgtcctgtccctggcttacttcacttagcattatttcctcagagtttattcatgttgtcacacattgcaggatttcctttttttttcttcttcttttagagatgaggtctcactgtgttgcccaggctgaagtgcagtggcacaatcacggctcactgcagcctcaacctcccaggctcaagtgatcctcccacctcagcctctcaagtagctgggactacaggtgggcaacaccatgtctagcctatttttgttatttttttttgtagagaaggggtctcgctatgttgcccaggctggtctcaaactactgggctcaagccatcctcccaccttggcctctcaaagtgttgggattactggcgtgagccaccacacccggccaggattttctcctttttaaaacctggataatgctggtatctacacacaacaaaatatgagccagatttcctcagtttttcccctgatatccattttctgttccaggatcccatccaggactcacacaccactgagctgtcatgtctctttagacccttcttggctgtgacagttcaaactttttaaaaagacttagagaacataacttttaacaaaaatagaaccatacatacattctattttagaatctctttttttttaacttaacaatgtatcctgggtgtcctcctatgttgccaaatttactcctattctaaaggaccaaggccaagaacaggcctccagccccgggcagggtgccagaaccacacatgggtaagtccacgatgaattcaatgctggaaactggctcttttggagccgttgtacctgagggaggttttgtaccataaatgcccaatgtcagctgggtgtggtggctcacacctataatcctgatactttgggaagccaaggtgggagaattgcttgagcccaggagtttgcgatcagcctgggtgacatggtgagaccttgtctctactaaaaatgtaaaaaaaaaaaaaaaggaaagaaaaaacaaaggccgggtgccgtggctcatacctgtaatcccagcactttgggaggctgaggcaggtggatcacgaggtcaggcgatcaagatcatcctggctaacacggtgaaaccccgtctctactaaaaatacaaaaaattagctgggcatggtggcgggcgcctgtagtcccagctactcgggaggctgaggcaggagaatggcgtgaacctgggaggcggagcttgcagtgagtcgagattgcgtcactgcactccagcctgggtgacagagcgagactccgtctcaagaaaaaaaaaaaaaaaaaaaaaagcctagtgtggtggtgcatacctgtggtcccagctacttgagaggctgaggtgggaggatcgcttgagctcaggaaattgaggctgcaatgaactgtgatcacaccactgcactccagcctggctgacagagtgagaccctgtctctaaaaaaaacccagtctcatgaagaaccctgaaagggtccagtggggtaaggctggcagctgccaggatggaaagggccctttactgcctcctgcctctgggcctttgaacatgctgttcccctttcttggaccaccttccccacacacctggcaaagtcccactcatttcagcttagatgccacctcctccaggaagccttccctcacattcaaaggaagattgtggggctcatgaagctcccagagcctcctccttcagaacaccgccactatgtgctggaattgcccctgaagagcctatgagctgtgaaggagggaccctgtcctctctatgcgtccccagccccagcagaatgcctgggtacagcaggcgccctgttagtttctgctggatggacactgaagagctgggacaacacagggatccaagtcaaactcaaggaagccaggcaatttcgtgccaggaatcca

SEQ ID NO: 95545 - DNA, 13085 bp, Homo sapiens
ctttaaatattctctctgcccctttgtctctcttttctccttttgaaactcccacagtgcatatgttggtccactgtagggtatcacatgtcccttaggctcttttcacagttctttagtcttttttctttctcttcatcaaagtcaatttttattattttgtcttgagtttttttatttctttcttctgcttgctcaaatctgcatttgaatctctccagtgagtgacttttgttttttttaaatttcttgtattttcagctccaaaatttcttattggtgtctttttaggctatctattttttaaaaaattgatgtttccattttgttgataaattattttcttgactttctccacatcttccttcagttcttcaagatagttgttttaaagtctgtatttattaatcccacattcctacatctggtcattctcaaagatagtttttgttgattgattgcttgattttccttggaatgggccttattttctgtttctttgtatactgctatagactgaatatttgtgtccccccataatttgtatgttgaaactgtactcttcaatgggatattatttggaggtgaggtctttaggaggtgattagggttagattagagcatgaaacttgggcccttaatggtgagattaatatccttatataaagagaaagaggcatgagcgatctctctctctaccatgtgatgatacagcaagcaggcattccactgcaaaccatgaaaagagccctcaccaagaactcaactatgctggcactctgatctcagacttctagcctccagaactgtgagaaacaattgtttgttgcttaaatcaccgagtatatggcattttgttatggcagccttagcagattaagacatatgcctggtgattcttttggttaaaaactagacatttgaatcaaataacgtgataactctctagaaataggactaccctttcctcaaggtttgtttatttttgttttttgttttttgactattgacagctatttctgtgtcagtgatcagcctgacatataaacttaatttcttctttggtctttctgagcctatgcctttccctcggcatgcacagtgacttcttattttcttctgttgctttttaacaccctaggtattgatatgtgtctcctaaaatgggaaaaaaacagggggaaatgcaataagaaaagaaaagaaatgatgaaattttaaaaaaatatgctggcctttaaatcctctggaagtcacttcagccctatgggaagaggcttgtaagagtagggagggagatgcaaggatgcctgcccacctcttcatctgttcctctgtgatcagaagcagcaatgagaaatcagaagacagatccctgatatttggagaaaagggtccttattgcccaccctggctcctgctagctgtatacaagctgctccaggaacatgttcatggcttcgtgctgtggggcttgtgtcaggactaggtacttgttactgtgctcagagctggaatagaccaaaattaaacacaatttactatctaagccttcctctggaagttgaaagacatgggatagacttcagatttccaaaatacttactctaacacattttgaaagtacaattgttgtctaagcaggaaggtggatatttggtctttcctactttgccatcatcccagaatccttctacatttcctttctttttggggcatttttaycttttgttttcaatttccatctggtgcccatatcctcattgcatgctttgattacttggtgcccatgtttgggcctgggtgctgattcagactatgtcaccatagtgaatcaatgaaaccgaataaatactttctgtcatactgctgatgaagatggattagatttcccagtaccttattactgttctattacttttgtttctgtgtgtacagatttctggtatgtcttttatccagcatacaaaataaaagaaaccttaaatagttattcctcaaatctagttctgaagcaaacatttatgaaagatgggggaagcaaaatgtaggagcaaaatgaccatgaaaaagttagcaaataattgagacaaatagtgaaggaccttgaggaaattaagtctagtttcttcaaaaacacattcctttaatacccattaccatctctagcatatttctaatatgtacacagatctctgctacctgttgagaatatattaatgatgtatagattatattagtaagaaactacaggacatatatagttatatgaaggatacatatagagcttctctcgctctcatatgtgtgcatatatatgtgtgtgtatatatatatgtgtgtgtatgtttttttaagaagagtttaagaaattttctaacatgattgtggggctgaagctagcaggttcaagatcagcagggcaagctgaagatgaatttaaaaattgatgttacaatttttagtattaattctgaagtctggcaagctggaaaattgggcagcatttctacgttgcatgagaattccttcttcctcagttacccttagtttttgctcttaaggtcttcaattgattggatgtggcccacccacattatggaggttaatctgctttatccaaggtagtgaatcaataactattgattgaaatgttaatcagctaaaaatatacattcacggcaacatctagactggtctttgaccaaacaactgggcaccatagcctagccaagttgtaacataaaattaaccataagaaatcattgaacaaatactcagacattattttaagggagctgacaatctaatgttaagacacagatatgaatagataaggcaaatatgcagaatgtttataattgtatatctaggtgaagtttatatgggtgttcattgggctgttcttgtgacttttctctaggtaggtttgaaatttgctaacataacacttttagggaaaagaggcattttaagcaaatgcatcctctgtgtcgcatactaacaagaccaactagcccattgtattggaaatgggatcagagaccaggaagtcctcccagaaggtctgggtcttgcaggggaaatagttgacttttgtgccagcaaatgaaagtattaaaaggcagtgggaagtctttgtttgccatttggtcaaactgggttttggagcctgaagctccctgtccctgaagaaaaagtgactagactaggacaatcaaaagggaagcgtggcttcctaaacaaatacgttttcaacattgttctccatttatgcattctattctcggcagagagaagaggccctgacacatattaggatgccataaattatgttatacaaaataattatttttatttcctataagacctggtgaaaatgaagcaaatagacaaagtaaaaatagtatatttattctatgttatattttggaaggatgtacagggggcaagaaagatggtaaggagtgttaaaagaaagtcccttgaaagaagaaggcttactttcttcaaaatcctttaacatttaaattgccaaattttattcttatccatctgactgaagcaaattttatcatgtagaaaacccttaactgtatgaagactccacagtctaggcttctgctctcagaggctgtgttttaaaagcatggaaacccacatggaatctataataaatcttaaatgatggctccatgtgggcatacatggctattgttgatgctctatgcactacatttatattatttgttttcatatattagatgtttccttgacactgagatttattgaattacgaatagcgctataagaatctcaagtgtcagtaaaaaatggctaatctagtccaaaatttttaggaagttaatgctaattagggttacattaatcatccagacacagagaagtcatatttgaggcatgtcatttaataaaattgtttgttaactactagtgaaaatcttcttagaatagagattaattggtaaggaatatgaattgcataataaatcaaacaataccaggattaaagtattaatctctgagcaagatgggaaattacattgccagaagggaagtcttctcattctaagttatttaagcttcttgataagcctgccctgatatgaaatctactggtttgcaaatttaaaaagtcatgaagtatatattttaaagaaagcacaatttggctgggtgtggtggctcacgcctataatcccagcactttgggaggctgaggtgggtggatcgcttgaggtcaggagttcgagaccagcctggccaacatggtgaaaccccatctctactaaaaatacaaaaattagccaggcatggtagcgtgtgcctgcagtctcagctacttgggaggctgaggctggagaatcgcttgaacccaggaggtggaggttgcagtgagctgagatggcaccactgcactttagcctgggcaatagagcaaaattctgtcaaaaaaaaaaaaaagagagagagagaaagagggaaaaagaaagaaagaaagaaagaaagaaagaaagaaagaaagaaagaaagaaagagaaagaaagaaaagaaagcacgatttaatcactttctcctctaaaaagcaggtctgttttgtaaaattaccaaacctcaaactaatataaggaacgataatgtattttgtttatatataaactccatctgtttctacatactttctagaggaatagattttactttcacacgtctcaacatttgtattaaaaatgattattttgcctctcagtgaatgaataattgttacgttctgtcaccatgcttcagatttttcatcctgaactgaaatactctccttccttaagctacaaaagacacttcatagaaaagcaaacaagcaaaaaacgctgatttacaaatggttttcattcttgatttgtatgcaaaactcttcctctttaggaagatatttgacattttaataacagtttgccatctcccatgtaccatgagtacgaaatattttgtaaccttagggatgggccagatgaatatgccttaaggaaagcttttgcttgatggcatcagtgtcagtgccctgtatattcacgagccattgtcccccagttgggagagatggcagtcctgttgtttcttaaagtcataccccctccccccacacacaacctagtcaatgtcttctttttatatagcaattaaaaaacatcaaggtgtttaaattattatgcttttcattttgattcctaatttaaatttcattgtccatacttatttttccctagcattatttcattcctaagtaaatcttacaggaaagaatctgatctttctatgagttttaccttaggcaatcaaaaagctgctttataagctgtttcttccaagccttttgaatgttgtcagacatcaaattcattgtttgtcatttcctgtttacaacaaaactaaaatatggttataaagcctagagacaaacttccttaagtataaaatgaatagaattaaaacgtattttattctaaatagcaaaatactttcataaagaaaaatgaaaattcagaaattaggctggataaaagttttatataccaaaaacagcacactatacagttgaaggatacagacccgaaatccaggctagacagtttgacacaccagacatgtgcctgagctctctgatcttggacaagttacagagcatccctgagacccagttttttcatctggggaatggaatggagatgatgatagcacccaccattgggttgttaaaataaatcgtttatgtaatatttataaattgttgaatatcatttgatcatatacataagcatgtgttttatgcacactgttttttgtttttttttttgtttttttttttaatttcagaacagtcagactcgcaccgcagcggccgggaacgctcgcagttcacatgctcagtcctccttggctgactcgccacacacgctgccgcagcatggacgccccgaggtaggtagtcaactttgggcctggtccagccaagctgccacactcagtgttgttagagatacaaaaggaattattagactacaaaggaattggcattagtattcttgaaatgagtcacaggccgtcagattttatcaagattattaacaatgcagagaatcytgtgcggggattgctagctgttccagacaactacgaggtgatttttgtgcaaggaggtgggtcgagccagttcagtgctgtccccttaaagttgattggcttgaaagcaggaaggagtgcggactatgtggtgacaggagcttggtcagctaaggctgtagaagaagcctgggactataaatattgttcactctaaacttgggagttatacctaaattccagatccaagcacctggaacctcaacccggaagcctcctacgtgtattattgtgcaaatgggacggtgcatggcgtggaatttgactttatacccgatgtcaaaggagcagtactggtttgtgacatgttctcaaacttcctgtcgaagccagtggatgtttccaagtttgatgtgattttttctggtgcccagaagaatgttggctctgctggggtcactgtggtgatagtccgtgatgaccaactggggtttgccctccgagagtccccttcagtactggaatgcaaagtgcaggctggaaacagctcctcgtacaacacgcctccatgtttcagcatctacatcatgggcttgctcctggaatggactaaaaacaatggaggtgctgctgccatggagaagcttagctccatcaaatcccaaatgatttatgagattactgataattctcaaggattctacgtatgtccagtggagacccaaaatagaagcaagatgaatattccgttctgcattggcaatgtcaaaggagatgatgctttagtaaaaagatttctcgataaagcttttgaaactcaatatgttgtccttgaaagggcacaggtctgtgggaagcatccaggcctctctgtataattctgtcacaattgaagatgttcaggagctggccgccttcatgaaaaaatttttggagatgcgtcagctatgaacacatcctaaccagaatatactctgttattaaacaacatacaaagtttaaagtaacttggggatggctacaaaaagttaacaaacacagtattttttctcaaatgaacatgtttattatagatttttcttttttgaaagaacaacagcaaaacatctacagctctgcaaagctggtgtgaagtaatgttcaccttaattctgatttgaactggaagcattttcaaaaatctcattgcttttctaacaaattccagcttattttgcctttgctgctactctttctagttagatttaaaagctgcctgtggatataataatgcaagttgcaattaagtatttctggagtcatgggaacacacagcacagaggtagatggggccctctaggtgctgaatctagacatctgtggggtctcctgggttcagcggctgttgattcaaggtcaacattaatcattggagtagtggtttaagagtaccaggcaaagggaaaactgtagatcaatgtttatactgttattacaagagaagttacatactttatctatgtttatattagcaaggtgtgttgttaataccatatgctttatatttctatgaatttatatttctaataatacggttatcactgatacatgtagagacttttagaatttattaaatccttgactttgtgcatcatagcattccattagtaatagtttcaccccctccctagtcttccccttcctcttttcaagctgttttatgaaaaagatctagaagttcttgattcatttttactgttatttccataggtagaagataaagttgacaggttggttgttttttaattatgccattaaactaagcacttctgttaaataatcttatcctttcttttcttgactgttttctttgtaatgtttaacgacgacagtgatactttgctgaaaagtctttcccctattgtttatctattgtcagtattttatgttgaatatgtgaagaacattaaagtcctaaagcatctaaaaaaattttcagaacactttcacatagacagaaatgttgcaaggatagtacaaagtgttcccatgtaccccacatctagtttccagtattactgacatcttttattacaagtgttcatttgtctcagctattcagattgtattcgtttttacctaatatgctttttctattccaggatctcattcatgataccatatttcatttatttaccttgtcttctttgatgatacaaggaagtatcatcaaatactcctttgatgtgtcatgacagtttctcagactttccttgtttaatctgacattgacagtgataattttgagaagtactggtcaggtattttgtccttcatttggggtttgtctaatggttttctcatgattagaccagagttaggggtttggttcacagaaacaaaacctttgaggtaaaatgtcattctcatcacgttatctcaagggtacacactatcggtgtgacttactactgatatatggagcttggtcacctggctgaggtagtgtttgtcaggtttttgcactgtgaagtggcttttcctcatcccatccttttcataccatacgctatagaagaaagctattatgcttacacttaagggatagggggttatgttcttcctccttgaaactaaaacatctacattaattatttggacttcttctgtacaagaaatttgtcttctttctcacatatattacttactcaatcatttatttatatcagtatatatacatgaattttattttatactttggctatagtacttttttattttcgtgattaacttattccattttttggccatcttttagttgactctgtggcccctaccttcactgttttctttcttttttcatttaagtactttcttgcttcctggcatgaaaagatgctcaaggtatcttgtccaaatgtggccatactggggtaatttgttagtgccattttagttggacttgaatattctctaggctggagtattcagtctcttctaaggaaaagcacagcaatataaaaagtcaagagctttggaatcattcaggatagaaatcaaatactgacctgactattgcttacgtgaccttgagcatgttatctcctcttttaatctcaaaaatattataagcccttcctcactttggaatatgaatagaagtagctgtgctgagatttcaagttcaattcctgagtttctttacctaaaattttccttgaagaataagctgaaatatatttgtgaatttttaaatgattgaaaagtcaacaaatgctaaacttaattttagagaagtatgaagcaccaattctaattgaataatttaacatttttgactaaatccaaagaaatgattggtcctaactatatgttggtggcatttttgtaaacacataaacaaaaataaattattggcagacaaagtctacaatagagaaagaatgagtgcctgccattaaggatgatgtgacaattcagaaaaattggaatttctgggtttaatcataaattgttgtttgaccttggccatgtcatttctcttctctcttttaatttgcttaggtgtagaacaaagttaacatatcatccattcaaatctctttgaatgggaatttatgtgtatttatgagctaatgattaaatgtcatatgaattactaagatgaagtaatattcagacatgacagcattgcttgttctcattatatgccagataaaaataagattttcttgtacattagttctctttgatgcaaatactactttaatttacctggcatgttgcttctcaaactttctgtcttccacaaagcctttattaactcggttttcttttttatatcttttcattcctagaattgaacacacccaattattatttctctttattcttttaatgtaatctaattcttaatttaatggatatttcaatgtaataatacaatatttcacctccacatgcaattgacaaagttcttatgaaagaatcaacattcaaccaatattccatgagttcaagagacattgattgacatccttctaaatagctcaacggcaccgctctgagcagtgagcttactgtggtgaatgaacaggaggaaatacctgcattaatgatgctaaagggagttagagagggtaaacaaataaaaaccactatcagaacatatgtggtgaggaatgctgaacacaggaaggaagaagcaggtgaggagacccattctatcaggtgtggaaggaggctgattttcacagaggcctgaagagacgagtgagggtgccctgaagattcttgggtgtaccaccttccccaggaggtccatacagggccgaggccctgaggcaagaccatgctgcacaggtatgaggacaatcacggaggtcatgaggactgagatgacaaagaaaagctttttaagtcaattgcagcaatttccatttctcccccatctctaaaatgtttgacaattcccctatgctgatttagtcagtgcattttctgttatttagtgatacttatttcctgcttaacagaatacctggcaaagtaagcttcattcacatggaattctggaaaaagaagtaaagtaatcaagaagggtttcaagattcagaaggcagaaaaaaaatgccaaatactgaatttaaaagctcgttactggtcattagaaagcactgaatgatttaatatcataatgtagatggaagacctagcacagtagtttgaaggataaatgcgagaaacagaaagatgaataggagacagacaaagcaatagctgaaaaacaagttaagatttaggaaaatcctatatgtacatatttagaaaacaaataaaactttgttgttgttgttgttgttgttgttgttgtttgtttttctgatagggagtctcgcactgtcacccaggctggagtgcagtggcgcgatctctgctcactgcaagctccgccacccgggttcacaccattctcctgcctcagcctcctgagcagctgggactacaggggcctgccaccacacccagctagttttttgtatttttagtagagaccgggtttcaccatgttagcgaggatggtctcaatctcctgacctcgtgatctgcccacctcagcctccccaaacttttattacaacatatatttgtgtgtatatatacatatatatatatacaaagtattgtaaagacagtttaataaattttacaaagttatattgaagttaaaataatatacaaatgaatctgtaaatttaacattttatttgagaagaaacaatggcatttggaggcatgcataaagaccgagtattttttgtatgtctaaaggacaaaaagaaggttggaagtgttcttaagaagatgaagtttacatgcggtcctgagagaaagttcattaggactaagtgagctctgaggagttggcaagctccattggtgggtgactagttgtcaaaatcagtcctagagttgtagcatactatcctagcagccatagataaaactggtctcagcttacaacaggtaattttagccactggatttttagacaattacatttccaaagcaatgttatgtaccctgagcacttttcactcctggcccctggattctgatttagttggttataaaaagaatgacccaattcagataatcaactttcacagcacaccagataaacagaaaactgcaccagccatcctgtgcctcctcccagacattacctaccccaaaataacagtctcctgaagtcaaaaatcacagatacgcttttcccatatgtggaattcatatgaatggaaatatagggtatatactcttttgttcaacattatgtttaggatatttatgcatatggttttgtataattatagttattgctgtctgaatgttccattggtgaatggagcatgttgcacttatctgttccactgctgatcagcatttggcctgttttctctgggagtttggataatactggagtaaacatccttgtaaatgtgtgttaggcatttaactaggagtggatttcctataatgtaagactggcacgcgtgaacctttagtagatactgccaaaatgttttccactatggttgtataaatttaccctcccacttactgtgttgagagttccagttactccacaaagttatagacaacgagctttgtcttattcatttcagccttccagatgggtatgtagtgtcatagcctgtgtatttgttttaatagaaggggaagagttacttttattatttgtgtttgttttaaaatatttttatatttttaactggtttcttgcataaattttagccagaaataagtggcaaaaatagtacaatgcatttttctatatcgtcactcagcatctccaaattttcactttccatgcaacaacaacaaaattactataatcaggaaatccacatcaatgggatactactaaatagtctaaaaatcacatccacattactgattgttcactaacgtccttttcccgggccagaatccaattcagaaacaacattgcacattgatgtgctaactccacagcctcccccaacttgatcccgttcctcagtcttcccttacgctgttgaagagaattggccagttatcttacagattgagcttcagactgggctttaataatgtttcctcatgataaaattcaggttattaattttggggcaagaaaaccacaaagtagcattgcctccttctcagtacacacatctcagtacacacacatgggtcagtgacactgcctatgggtcatatccttttgactcacctggttagggtgttgtccaacagttttctccattgtaaagttattattttccctttgtaattagtaagtatcttatgaagaagtactttgaaactatgaaaattttctgtttctaataattcttttggccactaattttataattatttcatcaatgaacatacattgt

SEQ ID NO: 95546 - DNA, 69358 bp, Homo sapiens
tgacctctggcattttttctgattgttagacattgactgtcaccttttggtaggtcagttagcaaagacattgatagagaaaaagaggagcagttctgtactctgaacctgaacctgttctaccaagatggaacctttggaggaaatgtgttgatgtgacacttaagactatggtaaaaaaaaaataataataaaaaaattgaaggaagcaatagaagagcaaactcttaaggagagcttgtcaaaggtcaaattaggttcttcccttgttagaatttgtcaagaaaagctctagctgaagaggtcaccttgaagttgagacagagaaagaaaaggcgatagccagctgaagagtgggaggtgatcatcccaggcagagaaaaactgcatatgcaagaaaagagaggaagcaagcacttggcatgtttgaggaactgaaagaggaccagcatggccacagcttatctccaggaaggtggatatatatgaggttggacataggttttttagtccatagcgagcgattagatttttattttaaatgcaatgggaggcccccgaagggctgtatgcagataagtgaagtgatccaatttccacttttaaagatcattttgctgctgaatataaatgtattgtagaacaagactgaaagctgttgcaggaatgaaagtgaaagatgctggcagcagaactggagaggtcaagtgtgagatctgttgtggagataggattttgggaatcgatgacggtatgggatacaggtgttgaggggatgaagagatcattgatgaatgtggtgatattaaataatagattttcaatgtagacaaaacagccttatattggaagaacatgccatttaggactttcatagctagagaagacaatttgatgcctgacttcaaagccacaaacaacaggctaacacttattaggggctaatgaagctgttgactttaagttgaaaccaatgcttatttatcttattaaaaattctagggcaagtaagaattatgctaaatctactctacttgtgctctagaaatgaaacaacaaaacctggatgactgtacatctgtttatagcatggttactgaatattttaagtcattgttgagacctactgctcaggaaaaaaaaaaaagattctttagattctttaaaatactactgttcactgacaactcacctggccacccaagagctctgatggagatacacaaggagattaatattgttttcatgcttgctaacataacatccattctgcagcccatgaatcaaagagtaatttttactttcaagtcttattaggtaagaaacacattttgtaatggtatagctgccctagattgtaattcctttgatggatctgggcaaagtaaattgaaaaccttctacaaaggagtcaccattctagatgacattaagaacattcatgattcatggaggaggccaaaatatcaacattaacagaagtttgaaagaagtggtttctaaccctcatggatgactttgaggggtttaagacttcagtagaggaagtaatggcagatattgtagaagtagcaagagaaatggaattagaagtgaagcctaaagatatgactgaatttctgcaatctcatgttaaaacttgaataaatgaggagttgcttcttaggaattaacaaagaaagtggtttcctgagatggaatctactcctggtgaagatactgtgaacactgttgaaatgccaacaaaagagttagaatattacataaacttagtcgataaagcagtggcagaatttgaaaggactcattccaattttgaaagaagttctaccatgggtaaaatgcattctctgctacagagaaatctttcacaaaaagagttaaaagatgcagcaaacttcacggtcttattttaagaaacaccaccctgatcagttagcaaccatcaagtcaaggcaagaccctctaccagcaaaaaggttaacattcactaaaggctcagatgaccgttagcatttttttagctataaggtattttaaattaaggtatgtacatattttttgtagccataatgctattgcacacttaatagacaacaatagaatgtatgcatacctttcatatgcactgggaaaccaaaaacttcatctgtctcactttatggagatattcactttattttggtggtctgatactgaacccatagtatctcaaaggtttgcctatataataaaggctaattcgtttataatgctgttagcatattttcttcattcacaaaaaggtttgcttactgtataggaaaaagccctacccatagctccctgagtcgaacgagttgcccatcctcaacatcttattaggatacttggcaataattcacagacctttggggacaatgagcaggctttcaaatactgcttgaaacagggataaacgctgtattttcaaaaatagtgtaagtgttccatggttccctcaggcaattagctcgtgttgttgccataagttgccctacttctatccccacagaataagcatttggtccgtctgctcagagttatcacgtttttccttcttccctctaggtaggtcactagattcctttgtgaatgaacagtgtgcatcaaagagccattaaaacaaaaaaaaccctaaatatgtgtgaaatgcagctcttagyatttctctggagcattgaatcatattatatgtaattataaaatactatcggaaaagggcactttacataccataatagtcattttataaagttcaatttggcaattccaagccacatttaattttctctgaaaattcccacatggcaggaagatattgctctctgcagctttcaagtctctttcagggaacggtaaaatgacaaycttttaaaattagcactttttctataaatagagactaaatcacttataccaaataaagtcacatatgcatttttattaaagtaaatactaaaataataagtaattttcctacataatcattttgggattttacgcaaattagaatactacaatatagtttagcatgaatcatttgtagttcttcatcttcactgacaggtggggctagtgatttctgtattaattataatattttagcatattaaaatctgtatctagatgaagcagacacttcaaagcttcaaaactgatgaaactgcatacctctcttttaagggataaaaccatttgcattaatatgtgaaatacactactaaaacaccccctgctgatttcttaggcttttgcagggagttatgcataattttctgaaaattaaaaactgaggattagatatttatgataaaaattggatctcaagaactattaaaaacttggaagattctcctaagctagaatttttaactcagttaaaaaattatttaacacgtatcagaggttaataaaaagcacagtgcagtcagaagatctaaactcagttacaccacttactagcaaagcactgtgctatggtctgaatgtcccccaaaattcatgtgctgaaactaaatcaccaatgtgatagtatattgacagggaggccctaagtgggtgattaattgattgaggtagagctctcataaatgggattagcaaccttatgaagagctggagggaattagctaatccctttttgcccttctgcctttggacatgtgaggacatgacattcctcttttctgggggatgcagcaacaagatgctatcttgaggtaaagagagcagccttcacaaggcaacaaacttgccagctccttgatcttggactttcagcctccagaactgtgagaagtacatttctgttctttataaattacccagtctcagatattttgttatagcagcaggaatgaactaagacacatctttgtgaacctacatcacagaattgaaatgagaattaagtaacaaaggaagctgctttataaataggttcagttattgaagatggcatggtataaaccatccataaattcatatttagatctggggacaaattatcaggaatctacaaattctccacgcaaaggtgtttcactcatttagattttagtttgtttttatgttgatgttaatcttttaaaaagctcatgtgattatatttggggtcatctgaacatcctctttatacctgttacacaacgtgtgtgttcatggtagcattagtgccaaataattcaaattcacttgtttccaagctactgaaaacagatgcaggcagacttaatatgtagcttccatattcttccaaaagaaagacaagcgacaatggaaaaaaaattgaacaaagatttggtaatagtttgactccagaaaactaatgagaacattcagtcattacatggcacactggatcactggtaggctgaaacttaaaaaaaaaaaaaaaagaaaacctgccagttagcactaagtgtcgtgatttaacagtgttcatccttgtcaattaataagaccatttgtattggttttgtatatatttattgcaattgttttaaatagtcatatgaaaactgtaagcttatgtttacacctagattcgtatttctatatatttagatgttacaaaattaacayatattaacttaaaaataataagctgatacttgagtgtggccagtgagatcagaactcagaaaaaacacaactcaggttgtcttctctctgtactttgctgtctgactctgggcattgtcaaatgacctcacctcccctatttcttcacagcaaactaagaataataatctcattcacatgggaccattgtgaggagtacgggaaataatgaatataactgtgaaataatgctttgtcaggtatactgtgttttggacgataagatatctgaatcaagagtttgtacttccagtctacattttgatgccacgttgggcaaatctccttacctctatggtagtcatcactattttttaaagctaggagattatctcagttccttttaaaacagcttttatagaaggtggttgagttttccactggaatttcaaagtactcctcatttttatatccatacccatagttgtttcgttttccattagcttttttaaaaacttactaattgaggaacagaaactttaaaattcatttgtgatcaacgcagcaatgtccaaacataagcagggttaaaacagcaaaattctcccacctatcagagaaactttaatttttttttttttttgcttcgttgtttttatctcgtataacggaaagacagaactcatatttcagtcttctctctgttcttagctgtaatcctagcaaatcgaatgacctctttacactggccaattattcatctgccaaataataacagccaccactgatcacgtgggagcttacccaatgccatgcgtgcactatgttctgaacgtgcacaccaggcgatctctctcatttagtgctcacaattttgaggtagacattagctccatttaactgatgaaaaaactgaggctgaacgaagttaaaaacccatcatgcagcatctgcagagcggcggttctaaaaacgcctcacagtaagaaagaattgctaacaaacagtagctttgcctctaagcacccgcttttcctctaatattcacagacgggtatttagaacgttaaagagccggaagcccttgggaacttcagggcgggagtaaaccggctgcacctctcagagcaactcctccgaaaaaccccaccctgtccaggccccgcctcgtcccgccctcctgggcgctctccccatagcccgcccaggagaagcctagtccacccggctctaaccccgctctcacaggcggaagccgccgaccacccagcctgcccttctcgcggcaggacttakcgcatgcgctctcagcacgccgggaatttcctgtccgcggtcatcgcttccggtgggataggtctgaccaatggggctgactccgaggcgggccttaggtctcgcaggttccgcccctgcgcgttyctttcggagcggcggtgaaggtcctgggtgaggtagggktgkatggtgcttgccgcgtatcatggctgcctccggaaaactcagcacttgccgtctccctccgttgcccacgattcgagaaatcattaagttgttaagactgcaagcagcgaagcagctatcacagaatttcctcctggacttgaggctgacaggtggatggcttagcagtgctccccggatgtctccccagtgtccgtgggggcgtgggccggggggtcttgcacgtccccgcgggcgggtgtccaggcactggcgtgcgacgggcttttggtcaggtccttcgacctctttgtatcagaagaactccggtcccaccgcccaggagacacgtgaagtgcgttgattgctcacaaaactccgcgttcgggggggtgtagcctgccggcaggctgcataaatgccaagctccctaggggaggaagggttcatgggtcgtgaaaggcgctagtgaatattggaatctgggtcactgtgaaatcaatcattctgaaatagtacagcacatgctgactgcagttgctttacatgcagtttaaagttaccagaatttaaattgatgcgaggattttatcaataacttggtgaaaagagtatccctcgtatgattcgttttttaaacgtttacctgttcagtctaagcctcgggggcgctaatattcattcataagtacatattacacaagcaacattgtgctagtgccgggggtaggatatgggcgtgaacaaggcggtgtttcctcgaggagcttacttttagcaagtttacattcccacacctaattgtttaaagttactttttatgagatataatttatgtgcaataaaattaataagtttgaagtgctcaatttgatgagttttgacgaatgtatttatatattggtttaaccaccatcaccattgcttagtgatgttctatgagatgaggttgcaaaaatatattacaaatacgtctactaagtcacggctgragtacttaggttttgagattttcatatttcattctatttagtcccacttcagaagttgaaaagagcagtaaatcacacccaaaaagttcattttcacttaaatgaagcacactccagaaaacataaaatgttttatttcttggacatgtagtctttattctgcctgtaccaatatgactttggataaaataatttaactcaagttttctcttttttttttttttctttttttaagatggagtttcactcttgttgcccaagctggagtgcaatggcatgatctcagctcactgcaacctccgcctccccggttcaagtgattctcgtgcctcagcctcccaggtagctaggattacaggcgtgagccaccgtgcctagctaattttgtgtttttagtaaagacagggtttcactatgttgctcaggctggtctcaaactcctgatctcaagtgatccactcgcctcggccttccaaagtgttgggattacaggtgtgagccaccatgtccagtagtttcctcatcttttaattggaagaagggcctactactttaaaagattgcccactctaaaattctttggttctagtaatagctagtaccagccttttctgcttgttattagccacattctaaatataaatcaccattctcagggcagaagttataggtctgtgtattttttaaaatccttcaaatacattttctcatgagcctttatcttcaggagtaagtttcaaattctagatattatccactctttctatgggaaccagagttaacggagatgagggtacttagctgaggttagaagctcaggcagaagagagcaagattgaaatccaagctcattgatttgatagcgcttctttaatattcatttgtatttcaatgtgcctgaaaagtttgagagcagagacctgcctactgttgtagctctccattttaaagaaggagagtattaaatttattccataatgtatcattcctgttccctctgagaggcattggctttaggatttatacctatgttgaagtccatgaccttgtacaaataaaacaatagacaaggaaactgaaaagttaagagaaatgaaattgggataggagtccttggttaacatgtaaggattaggtgagaatgtrtgtaaatccatcataatagataagatggtcagtggatgctaattccctccctgttaaaagactaaaccatttttggatggctgagaaactagtttccgcattttagctgacaaagttatgttgttgaaaacaagcaaaaataggactgtgaacacctacaagaagtgctggtatgtttttagtgactaaatttccactatcctaggaagaccagttccttggatttccatatctcagaatcactaagaccagcccattgcatgtttttccagatgtgatgactggttgcacagagtcagtactctacctttttatgatgtcttaagggctgctaacttgaatttgattaattaaaaaattaatttttctgtattaacatgcatgtgtgcaaagctttaaaaaccctcaactgctcaatttaactttttcctgaaaatgactaagaattcaaatttctgaaaaycttacgatctaagaacttattgccattgccatagtgaccaccaccaagatgtctctagataaaaatragacttcagcactttttgcttttggatttcactagcaatactgaagattctgaatgtgaaactagtattgcttattcagatattcaatgttcartaactatagaaaagtgctgcattcttatccagtctgttcttaggagtcggttggtttcaaatcagtttgaaaggaatttgcrtgggacagatggaaactacaatattagctaaatttaagctaagaaactttgtcatgataatcctgtgtgtgttaagggactggtacagttcaatggtgatgtggtagcatattygattgccacttcatgttaatttaggtagagagttaaatagtcaaataaatattatacataaaggatcaattgattgggtaatggctgaatttttatagaagatttttctctctaaatttcatacgttgaaatttgccaagttaattgagataactaaaactctttttcctctagataagattgtaaggaaagctggcaatctgacaaatgcttatgtttacgaagtgggccctgggccagggggaatcacaagatctattcttaatgccgacgtcgctgaacttctggtggttgaaaaggacactcgatttattcctggattacaggtgagatgcttaaagtgtctgctttaggaggcaaaagctgaatttaaatctttatgccatgatgcttaaaccccaaggtatccaaagattatgtaggtttttcctcaactatagatccccaaggccccattccagagattttgattccatagtctggagaaatctggaaatctccatttttaacaagcactctcagagggtctattgactacaccttgaaaaaaacctgctttaagcatttatgctaaacaaattaattgttttgtgtgatttttttttttaagtctgctaatagctatgcatgtcgtggcccattccttcaaaaataaataaaaataaataatggccagtaatgactcattggtatgacttttgagaacttcatttaggttcaaaaagcatttccacaaacaaaagatgagtaagacatatgcacgtttgtcatcatgagagactaattatgaagcttaagcattcttttataaggtaaattttttaagtgaaggaaggaagttgtacttttatagatttaggatgaggtttaaatgaaatgatacatgcatctttaaaatacaggcactgttattgtataagaaatgagagttgaaggaactgggcatgtttcaactggagaaaagaggccctgggtaagagtgtatatagcagcacatccaaggttgggggtacataggataagcttgttttgatcttttctaagaaagagctaaaacaaatagatggaaattgagggaggcaggattgaggatttgaaataaggaggaacttactttttttaaaacgctggcaaacagtgaaatagattgtatcagggatcttgtaaagggatttcctcataggggaacacttaatgtcttaaaggcctttgattcctccataattctaaaattttaaaagagtcctgaacctttggctcagatgagaagcaatttatcatgtgactataatagaataatgtagttatctacgttattacttccatacaaaaggacaaattgattttaaacgagtatattctcatactaacttgtatatatattaatggaaaaatgttaatttctgtcagaacggtttgagaagttgtttttgaaaacctagaactttgtgtgcatgtatctgatttttttaagaaacctagcagtttttccctaatcttgctttatctagtttttatgctttaaaaaattacataatatttccttttatctagttttaccagtctatactaacagaattggtttcagatactaaactttatgttgagatagtcacatggcacatattccttgatcaaatgtggaatttaatagtgatttttgttttgaactgtgttcttattttaagaattatatataagttggaggtggacgtgggaatattattatttttggtgagatcatgagattataaaaagaaactaaataactgtataatccccttcgggcttattcgtgtagccctttttggacatagggaatactcacctgacttttttgctcttaaaaagacttcttgtccctcatatctcaccattcgttgggtttattctttcttattaggccagggggtgaaccagatttccattcattcccacatattcccctctttgatatgaacaaaagatctttgaaggcagattgttgaaaagagcgactgccacccttctcttctcagtttcccccaaacccataagtcactgcgttcctaattccagccttgttttatctcattcgatttatcatcatctgacatactgtatatatgttcttcccatttgtttgttaattgactcacctgtctggaatgtaagtaccatgagggtagaaatgtgtgtctgttttgttccctgctgtacctctatctcacgtaacagtgcctagcacatagcaggtgttcagtaaatgtctcacatgagaaacaaaaaagttgaccactatttctgcatctgtgtatatatatacacaaatgtatatgtatctctcatattaattaaatgtatcattaaatagtgaaagtaaatatttgtgtagcattgataatgaaaaagttttatgctcttttttctaaatgtgaaggctgatttcaagttaaattactctagaggaaatgtatatttgacttctcatttgtttttagtagaaacaaaattaattcttagtatcttatatgcaggaaaggaatttgccttaaaaagaaatgttgggtactaaaatatcaaataggcctttttttccccagtgaggaatgtttcaatatgtaaaactactttgttttagaggtactaaattaatcataaaactgagtaaaagcagaaagaargtgatctattttaaggataccattttagtgatttctaagctaatagaattactttttaaagaaattgtaataatttataaaataccttctagctgaaagcctgtcatttgtagcttaattcaattcctacagtattttcatgaggcagtttaggggaaagaaaaactggtgctaacatacaggattcatgctcagcatgttataaaggtaagaaaaacatgtctagtatgtttagtatagtatagttttgtggtaaagacgcagacttcagcatcagactgcctgggtttaacttcagattctactrctagttgggtgactttgggtaggtaattttgtcctctgtgcctcagtttgctcttaggactcatatgaggattcagtgtatgcctgatacttagaaagcactgaataatatcttagttataagtaatcagttaaattattatccccatgccttgattacctctggtgattaatgactgatcaggagactgctgatctgkaaagaggtataggaggaagtcgtgttattccattggagcactagaaaattctccagtgctatggaaacattggggtgttttccaactcatcaaacttgcaytggacacctagggtttcttttcttgatgttgtcacattctgattgtgcatttctaggtttttaagtttttcgttgtttcttgttacatttttatgactgactggattctctgtgctgtggagaggagtgaggagatttcctgaatctcaaggagcttgaggccttgataggtttttcctctttctgaactggaaataacttagatttcctgacatctcagggaatttgaagctttgataggttcttctccatttgtgaactggagataaattcgtaaatcactcgtaccctttcagagaagtagtacagatttcctctcattttttttttttttctgtttattttagagcaaacctgtgcaacacacggcccacgggctgcctgcggcccaacacaaattcttaaactttcttaaaacattatgaaatttgttttgcattttttttaagctcatctgctatcgttagtgtattttatgtgtggcccaggacagttcttcttccagtgtggccgagggaagccaaaagattgcaattgcacagcactgttttaaaggcttcatatattaaaaataataatagctaatatttatggagagtttatcacagtaaatactttgtgatatggtttggctctgtgtcctcacccaaatctcctcttgtagctcccrtaattcccatgtgttgtgggagggactcagtgggagatgattgaatcatgggggtgggtctttcctgtgctgttctcatgatagtggatgggtctcacaagatctgatggttttaaaaatgggagtttacctgcacaagctctctctttgcctgttgccatccacgtaggatgtgacttgctcctacttgccttccgtcatgattgtgaggcctcccccagccatgtggaactgtgagtctaaacctcttktgtaaattgcccagtctcgggaatgtctttatgagcagcagcatgaaaacgagctaatacactttgttttacagctttgttgagatacagttgatgctcagtaaactgcacatacttaaagtgtacaaattactgaggatttgtctgtgtgtrtrtgtgtgtgtgtgtgtgtgtgtgtgtgtatgtgtttgagacatggtctcactctgtcacccaggctggagtgcagtgacacaagcacaactcaacagctcactgcagccttgacctcctgggctcaagcaatcctcccacttcagcctcttgagtaggtggaactacaggtgcacaccaccatgcctggctgagttttgtatttttttgtagaaatgggatttcaccatttctacatggtggtctcaaactcccgggcttaagcaatctgcccacctcagtctcccaagatgctgggattacaggcaagagccaccgcgtccagttaactgagttttgacatatatgtgattgcatgaaaccattatcacaatcaagaaaataaacactcatcgtcctcaggattcctcatgtttctttgtaatctgtcccttccttccccctttatctatctcagacaaccactaatctgctgtcactgtagattattttttatttttcagaattttatataaatggaatcatacaatatgtactttttttttggtctggtatcttttacttagcataattattttgcagttcatccatgttgaggtgtttatcagtagtttgctcctttttattgctgaatagcattccattttctgaatataccaaatttgtgaatctattcacctgttgatagactttgggtttttcccttttttggctcttatactgtaataaagcttttatgaacattcatatgcaagtgtttgtgtggatacacacttccatttctcttgagtaaagacctaggagtagaatatccgggtcctgtgtagaatatccgggtcctgtggtagacgtatattatactttttacagaaataccaaattgttttataagatgactgtgccatattacattcccaccagctgtatttcagagctcccattgctccacatgcttgctcagacttggyatggtcagtctttttaattttagccatcctagtgaatatgtaatggtatcctcttgtggtttttatttgcatttccctaatagataataatactggacatatgatgtgcttatttgccatctttgtatcttctttggggaattatttgttcaaatatttttagtacttttactttttttgtcttattgaattttaagagatatttatatggttcagatgtgaggctttgtcagatacagattttacaaatgttttctcagctgtggcttacctttttattttcttaacaatgtctttgaagaacagaagtttcatgtttatgaagtgcaatttatcagttttttcttctagactttatgctttttatgtcttatttttaaaatatttgccaaaccaagatcactaaaaatttgttttatttatatataatttaatatatatttatatatataaatatataatttaatatatatataaatatataatttaatatatatttatatataaatatataatttaatatatatttatatatataaatatataatttaatatatatttatatatataaatatataatttaatatatatatatttatatataaatatataatttaatatatatataaatatataatttaatatatatttatatatataaatatataatttaatatatatataaatatataatttaatatatatttatatatataatttaatatatatttatatatataaatatataatttaatatatatttatatatataaatatataatttaataatatatttatatatataaatatacaatttaatatatatttatatatataaatatacaatttaatatatatttatatatataaatatataatttaatatatgtttatatatataaatatataatttaatatatatatataaatatataatttaatatatatataaatatataatttaatatatatatataaatatataatttaatatatatataaatatataatttaatatatatrtaaatatataatttaatatatatttatatatataaatatataattatgtatatatataaatatataatatataaataatataaaattattttataattttagcttttacatttaggtctttgatacattttgagctaattcttgcatatagtgtgaggtaaggtttaggttctttttttaacaccattttttgaaaatactgtcttttcctcattgaattgccttagtactattgtcaaaaatcagttggttttatgtgtgtcggtttatttctgaacttccaattctgttctatttatctataggtctattgtttcaccaacagccacctgtatttattactatagactgaagactgaaaaagccttcatttttgccttcatttttggaaaatattgtggcagtattttgttttattactctaaaaaagttgctccgccattttctcacttgcattgtttctgacaaactttttgcattgcaaaaagtttctgacaaatcttttttcatccttacctttgttcttttttctctggctgcttttgatactttctactgtttttgagcaatttcatcatgatgtgcttacagtagctttgttcgtgtttcttgtgtgtagaattcattgagcttcttggatctgtaggttttcctgtgctttttgttgtctaatgtctgaaaattttgtttcatctattttctctgttttttaaattggtttaaggtaggagaatatgcctggtcccttagactccatctttgtcggagtaggaagtttcaggattcttcttaaccattaaattatgtggttgttttgaggaatttttggagagagaaagtaagtcattgtattgttagtattgcctttggttttttgtttgtttgttttttgagacaagagtttcgctcctggtgcccaggctggagtgcagtggcgtgatctcggctcactgcaamctccacctcccaggctcaagcgattctcctgcctcagcctgacgagtagctggaattacaggcgcccgctaccatgcccagctaattttttgtatttttaatagagactgggtttcatcatgttgtccaggctggtctcgaactcctgaactcaggtgattcacctgccttggcctcctaacctttgggttttcttataggtaaacactggttatttccatacttcattggcatagtggaaagttcatgggattgagcatcaaatagtctagtgaccaaatctcagatatgccacctactagctttgtgaccttaagcttgctgttaaaccttttttagcttcaactttctcatctgcagcatgggaataatagttctcttctgtggatattgcaaagatggatagaaatggatgtaaagagcctggcataatcccagtagccagtaatagttgctattttaattattccccttccagtcatcttattaagagacatatgaggtaatttcagcgtccaggcagaaagagctatttttagttagagataatgaagttttgaaattctttaatctctaacaatttttttaaaaaggaagattgccttccttgctattgtgacgtaactatttactttacacatgtaacttacttgatgttaccatagttaatcataacatagacaaaactcaacaagtaagcaaaaagtggcttacagccaaagtgactttttagtccatacaaagtataagtacrgagatcagtggtagaagcaggcccactgacaactgtaagaagtaacagttgttacagtaacagaaagctataaaagacaaatataaacgcagaagaaacaataataataatagggtagcaaaaacaccttcgtaactattgaggccattattctaaagacaacagtaaccctaggtcatcaagaaaagggtgaaatttggtttagtgttcttggcctaaggaagaggattgtrccatatagcatccctatacattggcctaaggaagaaggttgtgtcgttggcatacctgtacgttgtgtacaatgtataatgataaaattaggataattagcatatccacctcgaacatttatcatttatttgtggtaagaacacacaattattatgtgtcaattaaaaataaaacaaacaaatagaataaaatctgatatggtttggctatgtccctactcaaatctcatcagtgagctctcacgagatctgatggttttataaggggcatttctcccttttgctcggcacttttccttgctgccaccatatgaagaaggacgtgtttacttccccttccaccatgaytgtaagtttcctgaggcctccccagccatgctgaactgtgagtcaattaaacatctctcctttataaattacccagtctcaggtatgtctttattagcagcatgagaacggactaatacaaatctaatgtcaaatttaaaaaagagagtgaaagatttgataatgacattgaaatatccaacaaacttaaaattcctataaaaataattttagatatttgtagtatcatttaagatacgagtggttatgtgatttctgtttgtttttgctctgttcataaatttaaaatactgagaaagtctgaaaaygtacatttttaatacaattcaagttattttacatactaaaaaaaaataaagcaagctaattgacattttgacatcatgctgtaaccttccctctaaaagtctgaaaagtctgctgtaacatcttaattttttaatgaataaatagcagtagtcttttatatgtgttatatataagaatacaaattttatctttcacctactatattttatactatagattctttccttctcatacagtttgcttaacagttttgcccagccctgttacaaatatttatttcaacagcatttgggccctactatgtggcaaatcaggaagaagataattaacgtaactacagtgttggctgccatgaaccccttacatgagaaggtgacataaaatatgcaaaatggstattcaatgtagtatttcttcttaaggaatcgataattttgtgtaagttctaagaattgcctaaattctttcctcatccagtaaaatcaacaaaaagctgcctagccaaaccacaattacttgccccctgcagaggagctttcactaagactttggttagagaagagatttttttttaaatggccacagaaagaatgcttctacatttgtgttttaacttgtattaaaggcattgtttattacattgtttcatgtaccctttacaaagcataataccagggaaaaaaaaattatctcttggagtcttggtacaactactattgaaaagcaaaaattatatatttcattatgtaaatcacgagagctagctgtcatgattgttaggattgttagctcttgtgttttacatatatgcttcccctcttcatggtttgattttcggtttcttcttttatagccttatgtaatgatgccttttactctaaactggcatacatctcattttggaagaatatagaattgaacactaaaataaaaatgaaagaagagtttgagagtgtctgtaaaaatactcatttggctgtaatctggtgcctgcatttgtgattggctgtgcctttaagcacattctgtgaaaacacctccagggttttgaagtgtaatgctccattgttattctcgaatgcatataatagtgattttcccaccccctccaccataccccatgtatcattatggtagtgaaaacatttctgctactggttggctagaaggtcttcatgtgttattgcctaatatcatttgaagtgtttaaaagggtactgtctatartcataatatcaatttagtctgtctagcactgtttccccataattgctttaaggacttcacataaatctgttaacatgagcgttcattccttctgcagtggggagttgcaaagtagatcaagctacaaattgtcaagaaggaggtgtaccttttaaagtgtggggaggatttggtttgtcattgactgagattgaaaagtgaatgggaatccaaaagaaatgtagttttaaacctaggaaaggagctgggtatggtggctcacacctgtaatcccagcactttgggaggccaaggcgggcagatcacttgaggtcaggtgttagagaccagcctgggcaacatggtgaaacctcgtctctactaaaaatacaaaaattagccaggtgtggtagygcacacctgtaatcccasctcttagggaagctgaggcaagagaattgcctgaatcccaggagcagaggttgcagtgagccaagattgcaccactgcactccagcctgggcaacagagcgagactccatctcaaaaaacaaacaaaaaacaaaaacaaaaaagaaaacccaggaaaggaaggtaaatttatttatattatattagcttttagatatacagttgtacctgtcagggtgggaaaagttaacacttcaaattaagttaaygtcaaacagccaaatttacattgttctgttgtgttttagtcctaactactaattattaaatactttctatatattgacatcatgagacttaagctattagttctgcctctttgtttttggcgtgctaatttgttttaactttgtgaacataattatagaaaaaattttagcgttttccattgatgataagtactgtgattaaatatgtggttttatacattaagagcatgccgcatagagagctgtctctttttaaatttttagtatattgaaatcgttatattttccaagatttattgcctggaactcaccagatcaagttttactaactagtggtaatttaaaataatctataagtacattagtatcagaggcatgcaattatttttgctaaactaccatggctaaacatatcaaactagatgatttccagacttaaaagtatgtttagcctcttaccaatagaggcgtttcagctatttatttctggaagattatttgtataaatctgcctgattgacttgtgaagtaaatctttgcaagtttctagaccctacaaatttgggaagccaacatctcccaggctaaaagagaaagtttccagctttacagagacctgaatgccatttggtcattcacttattcatgcacttcttaaatatgtattaaacactcaccatgcattgctgtagctacaggggctataaaggtagataggaaatgggtcctgcccttaaggagcatatgtccttgcaggggaaattgagatrcagtttgtaagtgctgtaaagaggcagacgcayagtacagtgttgacacaaaggtggactaatccacaagccatgtttcttggtccagtgtctcctctctggcttctgtgatcatcwtgtttatcctccctcttggttgtatgagttgggcaaggagaggtgttaggagaaaaaaaatcagctttaatggacctagagaattaggaccaaggtaggctcagggcaaatgttccctttgagcctgttcaccatccctataaagtgctgggcacattctagaatcttggcaactgagttgaagccaaggttctccgagctctgacttaatgtgggaagagagtcacttcttcccttgaaatctaccttagcagtgatgtttcttctcgttgatacattcactcctgccttttaagtaaatttataagctcagagacttttttaatatttaactaaggacttcaagaatcagttttgtgttgggcatggggcacttaacacaatatgaatttatagataacttagctataaagttttttgaattaagtgccaactcttcagtactgtgagagtgtggtggtagagtaggtggaatgaagaagaaaaagactacaagggaaaaagtgctttttttcccctttttgctcacaaagagaaggaaaaggaaagaaagcaaatgattagtacgtggaaataggttgggaagtagctattgttaaacatccagggtaattcattaggtcgataaggggtatggatcaacaaatattaagattagggatgctctggtcagaggagtatctcggagtgccaagtggagactggcatcgacaggtgactttctacttggctaaatctacgcatatattaagttaaagatcttgatgatatatagaatcctttgtatatatatttaggctataaagatttagttaaattaagcttatctttcatatggttgactcctgattaattctctgtatttcatgataatgtccttagtctctaatttaaaaacttattgataggagtgagtttattgctaaatctatatagaaatagaagtcatcctgaaggtcaaaattacactaatatatttgtaaaattgtaagctagtgttgtactgtctgttactatccctaatcattcataggtgttaaaatgaaacgccaccattgtctgttgcaatagacgtgatgcagtatttgttcattaatgatcacccctggtctctgacttttttaactgattttttaaatgcacaggtttaaaaagtttagttttgttactcgcataagtatatgagctcattttactgatctttttataaactagatgctttctgatgcagcacctgggaaactgagaattgttcatggagatgtcttgacatttaaggtagaaaaggctttttcagaaagtcttaaaagaccctgggaagatggtgagtgcttttgggtagttataaaacatttcttttatgattatttatatcacaaatgttcattttatgatacatttattacaaatgtcttatatgtttatattttaaattatctgaacagaattaaataatgtgtattataattttctcttgctacttgcttccaaattataaaatctagttactttttttagttctaattcatttgtctcatttccaaatgttttgtattctgtgcaaataaactaaccattttttgtgataccatataaggatagggtaaactatcaattgttatttgttccaaatagtggaaaaaaagaagtgctttagtaaactaagccatgcccaagccattgttttaactttttctattattcttcacattcaatgaccaaccaaggcagtcttcattcacagacagtgtttattgggtacctgctgtgtgcagcccttcagaatgcatagataaatagggtatgtttcttcctataacagactctcagaacaaacggaggagggcttaggtgcctccacatctggctgcccccatgtctctggcctcccccatgaccagactccttcagwtgggccgcacttgcagtctctgccagctgacaggccctcctgttcttagcatgcagtcttcaggtttctgccccagcccagccacactggaaccacaatgccttcctcattacctgtttcaaaccttatctgactgagttctcccaaattcatttaactgtaatccatagtcttccggaggatttctcttgctctttttctccctgataccagcccctcctgtttttccttttacatttgtgaactttttctaactattcttagctggtggttgtttttctacccactttgtacagattgttgtttctggggtttttctttttgggcaaatttgccagattactccattcctatggtttcacttaccacctacgtattgcagacattcacatctttatatgctgcctgtacccccttcctgggcatctgacctctgacagcttcatctaggtgttccataggcactttaacctcatcatgtccaaaatgaattctctttttcctcaagccaactctttttcctgtatttcctaggccagaaattcaaggacttttctctgagtaactgagcagtaattaagtataattttttcctcaataatccaaagcagattgtgagaaaacattgcttttgaataataagtgaaaaaaaaaatttagccatgtctatttatatrtttttctttgatgctattaatatccagtctgattttactcgtcactgaaattgtattcagaatatattgatggaatcatttcaggttgttttttcctctgccaccagatcctccaaatgtacatattattggaaatctgccttttagtgtttcaactccactgattatcaagtggcttgaaaatatttcctgtagagatggaccttttgtttatggcagaactcagatgactttgacttttcaaaaggaagtggcagaggtaagttttaacattttgtgactattttatcacatgttcaaattccaaagcaaaataataatactgcatttttaccacagtctgtgttttctaagttaatatcttattacacacacaagaacccagcagcagctcagccaaaagttaaaactttgatgatgatgacagatgtaactgctgtgggcttctgggaaaacatgaatgatgtatgttagccaaggaggtagtgtggtaaacacagggatgcaacagccatcgatgccactggagaaagacaaaagtgatgccctgttggccatacccaggattggcacgtgataccttaaaattgatcctttaggcttaatggcatggcagttaaagaatatgataattggccgggcatggtgactcatgcctgtaattccagcacttttgggaggccgaggcaggcggatcacgaggtcaggagtttgaaaccagcctggccaacatggtgaaaccccgtctctactaaaaatacaaaaaaaaaaaaaaaaaattagctgggtgtggtggggtgtgcctgtaatcccagctactcaggaggctgagccaggagaattgcttgaacctgggaggcggaggttgcagtgagcaaagatcgtgccactgcactccagcttgggtaacagagcaagactctgtctcggcggggcatgcgggaagaatgtgataatcaatttggagctgagaaagagaaggggattgagggtctcattattcagtatataaattgtacttcctccctcacctcagtgaagtctgctatgcctgcattcccatggcagaagtgttctgggttcactctagaaagtaaamcctccagggtragcaggggtggtgcttgagctgcaaaggtataaggasggatgtgcagactcttaagtggttttttaaaaaaattttattatgacatataagtacaagagtatacagccatcccttggtatccataggggattgattccagaacccccacaaataccaaaatctacaagtgctcaagtccctgatgtcaaacagtgtagtatttgcatataacctgtgcatatcatcccatatactttaaatcatctctacattatttgtaatacctaagacagtataaatgttttataaatagttgttacactgtattatttgaggaataatgataagggaaaaatctgtacatgttcagtacagatgcaaccatccttttttattccctgaatatttttgatctgggattggttggatccatggatatggaacccacagatactgacggatgactgtataatgtacatggatgacttaataaagggcactcctgaatccccatgtacatggatgacttaataaasggaactcctgaatccccacccccaacatgggtaattaaatcactagtacctttgagaccccattgtattccttactctgattgcatctcctttccatcccatgctagtaaggtgatcactactgtgaattttggatttattcccttgcatagtcttatcacacagatttatattcctatgatgaatacactttagttttgtccttttttttttttggacagagtctcactctgtcacccaggctggagtgcagtggcacgatcttggctcactgcaagctccgtctcccgggttcaygccattctyctgcctcagcctcccgagtagctgggactacaggcgcccgccaccacgcccggctaattttttgtatttttagtagagacggggtttcmccatgttagccaggatggtctccatctcctgacctcgtgatccacccgcctcagcctcccaaagtgctgggattacaggcgtgagccactgcgcccagcccagttttgtccacttttgacaactgggtttatataatgtgtattcatatagtatgtattgtttttatcctgaacattctttgtaggattcactgacgttgcttatgactgtagtttatttaggtagctatatatactacccactatttgactgtgtaagatccttatctattcattctcatgttggtggaccatgaattagtttcatcgttctgtttttacaaacaaaactgtygtaaacatcccatactgtgtcagttggggcacatgggcaacatttctctagggtatttacctgggagtggaactgcaaatcttcaccactgcatagataatgctaagttgatctctgaaatcatcacgcctgtttatattcccaccagcagtgtgtatgagttcattttgctccatattcttgccagtactcactattgccagacttgtacatttttattaatctcagggtaatggaatgtcattgtgttttctttygtccttgctggtttgtagcaaaatggggcactattgtgtgtttactggcctttttgagttccttgtttttagtgcatgctttttgctcacctttcttttgggttgcttatctttttcctactgatctggaggagttctcacatactctttaatactcttcatactagtccttagttaaatgtgttgagcatttcttctactctattgcatgttgttattttctttttatggtgtcttttgaagagcaagcattcttaattttaaatttatgtctagtgctttttgtgttttgttgaggaaacacttttatcttgagttcatgaagatattcttctgttatcttctagaagctttaygtttacctttcacatttatatctrtagtccactcgggtttgatctctgtgtatagtgaagtagaagcaattttactatttttaacatatgggtcccaactaacctagctccatttactcacaagtcagccctcgttgatccctgtcagcacctctgtcagcattggtctggttagatacatcatataagcattggtctgattagaaacatcaagaaaaaaatgacatgaaatccaggaagcagagggctccctacaggacagagagaaaggagtcctcaggaagaacaaccagtccagattggagccaattaaaaggggaatttgataaaactactgtcaagtttgcatagagtcaaaaaaaagttgcaaaaactcaggagagtttaagattgaattcatgataaataaatagaaaactaaatataacagggagtgaatcaagggaaatataccattattggaatgagaagtacaaaaatattatttggarataaataattattttgaaaacctaagaaaaaatgagagacatatataaaaataactacaaaacctaactgagaatctcaaggtcactgagataaatccagaaaaatatcatagccccagaaggaaaaatgattattttaaagaagctgatttttccaagaattctgtatatctaattataatcctcaaagaacttatcttgaaatacgcagttctaaggatcatctggaggaatagacctgcaacaatacataagaaatgttgaaaagggagagtgatgagaaaagacttccttgtcatatgctaaaatgtatggtgaagctttaataattaaagcagtatgagaagcagcacgtgacagagcaattactagactagaaagcccgatgcagacaccttagcagtatctgataatggtcagatcaaaaatcagcagtgaaggaaagaattaagtaaatgcatggatatttggttaactattatgaaaaaaaattatctctaaattccatttgggtctttggatcttctctttctgtcctcattacattcatgccttccttggcatttttctatgtatgtatgtatgtatgtatgatatttaaagtagatgttttggccaggcgtgctggctcacacctgtaatctcaacactttgggaggctaaggtgggaggattgcttgagcccagagttcragaccagcctgggtaacatagctccctatgttaccttgtctctacaaaaaataaataaaaaattagccaggtccrgtgctgcatgcctgtggtctcgactactcaggaggctgaggtgggaggatcacctgagcccaggagatcaaattacagtgagccgtgatcatgtcactgcactccagcctgggcggcagagcaagaccctgtctcaaaaaattgaacaaataagtagctgttttaagatccttgcctgctaatttcattacctctatcatttctgtactcytttagtgattgatttccccttcttgctataggttgcatttttctgtttctttgaaagcctgataatttctgacaaaacatcaggtattgtgagagttttattttttttaatgctgatgagggctggattttgtggtattgggttgagtgttgggtttgttgtgacacatagatragattgcttgaggcttttattgttctggtggatccagggtagcttttaatttggggctcgttgagccccagtactacatcatgccctttctgaggaaggcacccaacgccctgcatgttacaaggcctcttgagccatgtgagccccagttgctcctgccttcccctggttctagttcaggctcccaagcctcaggcacctgcagatcagtgctcagcaggggacttgggggacccttgggacccttttgctacctcaggagctctgcctcacattctctctccctctcctgttcctgtctcccccacccgctgctcctgcacacgtgtgagcaccgcgtgtgtgcgttttccatgtctctggtagtctgccccacaaattctgcctgccgaggcctcccagatctccaggtctggctccctgagcccaggagacctctaggctcagtttgagctgccccctgcctctgctgcagcctgagaagggcctccagtcctcttcaggccgggcatctaaggctcatctcctttccatttcagtaatgacagtcctgctccacctgttgtcctgtttatgcaaactcttgtttcctatgacttattcagctttatacttgtttcagaacaaaactttttaatgccagaatttgtttgaaatcaatagactctactactacataagcttaattctttaaatgccttcctctcagataatttgagtgtatcataagaatttcatttcttagatctatccctctctttttacccttgtttctgtttaggggaatcatttccaacaagggcacttttgccttatctgctcctcaggggcatttggcaatgtctgacatgtttttggttgtcacaccagggagggggctctggtctctagtggatagaaggttagggatgctgggaagcattcttcagtgcacagcagagcctcccacagcgaagaaccacccaacattaatcagcccaagatgtcagtcatgccaaggttggaaaactttcctttagatgatttggccataaaatctttctctcaggagtcttggaacttcccatcataaaaacgtaggaccgttgcatgtttgttaggaaccctgagatgatatcaccacttttcttaaggtctttgtcatttcctcttcatgaacctgctaattctcttgggttggtttgaattgggcccatgctgagttttctttgttgtttttctcaacctttggatatgttggttctgacagaaaccattcttgtttcctctgcacttatacaacttctgacaccagatgtgtgggttttttccacaccaagcaatctccaattctccgaacaccagctgggtatcctgcagtttcattcaattcygacactgtccacatgtttttagtgttagatcccacaagttaagggccaagtcccacaagactgcgcctcacttcagatgacagtcacaaatctgggcctctaggagttctgagcgaccagctataaaataaatcagagggttccatgtccccctcctcagattgaatcatttttcagaatggctcaaaaactcagggaaacaccttacctacacttgagtaatgggtaatcaattggtctcagtgaccagccccatcttgagctacctagaggcctcatcctaagttatctcattactgtaaactctgggggacttgtgaatttaaagcaagacatgccgattactcaggaaatttcaagggctttaggagccagcgacaaagtccaaatatatttcttattaaaccacatctgtggatttatttttctcagccgacatgattattttggtatttctgctcttgaataacacaatagagatacaaaatactatgtactctatttgtgtggggggaaacacaaagaaacagaggcttaagaagaggtggagtaatattttcggtgactcagcatgtcagttgtggttattaataatagtgttgcttcgacttcaccatatgcaattctttttctttaacaaaaaaagttgattttagttcaattttagcatgaatattgagaagagtttatatagagtctataatttatggaatgccttagaagtctaggtaacactggtcctctgattttcacattttgcaagtgaaagtttcagtgggagaatatatatatactatattagtccattcttttctttttttttttttttttttttttgaggccgagtctcgccgctctgtcacccaggctggagtgcagtggtgccatctyggctcgctgcaagccccgcctcccgggttcatgccattcaactgcctcagcctcccaagtagctgggactacaggcgcccaccaccacgcctggctaattttttgcatttttagtagagacggggtttcaccatgttagccaggatggtctcgatctcctgacctcgtgatccacacgcctcagcctcctaaagtgctgggattacaggcgtgagccaccacgcccagcccctatgttagtccattctatgcactgctataaagagatacctgagactgggtaatttattttaaaaaaaaggtttaattggctcacatttctgcaactctacaggaagcatggctggggaagcctcaggaaacttataatcatggcagaaggcaaaggggaagcaggcatggtttatgtggctggagcagtaggaagagagtggggaggtgctacayactttacaacaagcagttctcatgagaactcactcactgtcgtgcaagagggaaatctgcccccttgatccaatcacctttcaccaggcccctcctccaacattggggattacaatttggcgagatttgggcagggacagtaattcgcaccatttcatatagcagcattttcttatatgccatttactcttgacatggctgtatatgtaattttgtattttagccacaggaagctctttttaacatttactttgattggctttgttaattacaaaacagaaataaatgagcaccgtcgtcttattcctgtctctagcactacaggatctaagtgtaagaattcagctcatatgcattaagggacatatagacaatatgaagttacagttcataaaatataatcagactgttaagcagtaagtgagaactaatcccatctaacctcattttattaatataaatgatgaactgaggctcaaaaggtttaatgccttccagaaggtcatggagtagttacagggaaggctgaacttgagtacaggtagtgtgttttctgctaaagtcatgatgtgcaagttctcgatgctgctggccctgtgttcttttctttctgggtccagcatcagcctctttttctcccaccatctccagaggaccctggctgttgatgagcacatcccaagcagggagggagtcaccctctccattaattaccttacatagttctcattgtccctgatatatggctgtgtagcttctcaagtgtaagcctaatttttctccttgtacttaaaattattttagattaataagaaaaaaaaaaccactgtccttgtaaattctttgaccccttgtttttctcatactccatcaaaatgctttttaaaagctcaagggttagaggtttccttttaaagaaaaattaactagtttggtttcctgaccttttgttgctaaaatcatctatcttgtaatggatgttgaatttttatagctttcccaatagtacatctatcacagaaacagtaatgtatatttgaggttgatagaacatttcagttttatgctagctttgaatgaaatcttttgtagagctttctggtctgtgatttgaatttttccttaatgagttagggacagctatgtgtgctgcttttttctaaattgaaatatatgattcgcatgttttcatctctacagcctggggatatatgctacaaagattgaattgaatgggtcaggttaatggattgggacacatattcccctgaygtttctggatgtgttctaagtgaaatatacttaaatacttaaataagatcttttttgaattgtgccagttggatattaaaatttgcaatgcattttgaatttttgaattttctgccagtagtaagattaagctccttttttactttatgaagaactagaaatatttttgaccacttgatccataagcttattctttaacttaaatctctacttctgtcattttttgtagctgtatgagagtatatgtgtcttggttttacattttagtaagaaagattatattttgtcttacatgctatagtaactcatcacttatcttgagtacggcatcccaataatttcaactctccaaacagacaagagccagacagtttaaaataaaaaggtcatggggaagaggtatgagatgaaaggttggctttgagtacaatctataactttgcccataggaagtttcttccatatctcacacagaacctattttttaatcttccttaaggcaaagctctaataaggtaaattatatggttttcatccacggcaggctacaagcagcaaaggaaaagaagtgattagactatgtgtgtgcattgcagtgaagcgggaaagagcaaacccagcagctgcaaaccagctcagaaagcactgtgtcttttactgttgagcagtggggccccctgcctgcctacctagccccaggattattccagtaatcattggtgtttgtaatgttgcccctgaatcattcagaagagggttagaatgtcctttgagctcttaagaacacagagaggcaagatacattttagaaagataagcatccctaaatttttttacccaccactcagctctgttcaattttaatatattgccatatttttatatcttttttaaagaaataaaatattgttgatatgtttggagccctcttctatcccctttctttcccttctatgagttgtactatcttaaactttcgtcatcattatttccatacatattttatccttacattgcagataaatacaccacacacacatacacacacacacacacacacacacacacacactcagagtaaatgataggagtagtcttttcaagattttatacaaatagcattatactgtacaaattttctgtgacttgattattttttattccattttgggattcaatctcgtattccattatcagaattatcacagtttattttttcgttcacatgttgatttttattatttttttcatttcttgacattacacataataccataatgaacatttttatacctatcgcccrtgtaagtatgtatgtacgctgtgctctaggatatgttcttagagacctagagggtcatgaggttttacacagcttcagctctactgtatattgccaaattatgctacaaatgcttgtacagatttcctctctcactagcagtatctgaaagttcctatagctgcagatatcctccaatatcaggttctgttaggttttttttttaattgttcatttcatgtgtatgaaattatatgtaatgttctaatttgcatattcctactttgtactgtggtggagcatagtttatattatggtttatttggatttctcttatgtgagttgccttatatatwctattagctatttatcttatgattattgatgtacaggaatttcatctgtattctgaacactataaatttcaaatactttctcttagtctgtgacttacaaacatttataatgttttattatacagaaattaaaaattttaataaagtacagtagtttttgttgttaytgttgttgaggagggcgtcttgctctgttgcccaggctgrtcttgaactcctggcctctggcagtccacctgttttggcttcccaaagcactggaattacaggcatgagccactgttcccagccaagatcaaaaaaatatatatatatgtatatatacatatatatatacacacacacacatatatgcacacrtatatacacatatatatacacacatatatacacacatatacatatacacatgtatatatatacatatatatacacacatatatacacatgtatatatatacatatatatacacacatatatatacacacatatatatacacacacatatatatatattttgtccccaaagcaaagctatataagaaaagacatacatagatacatatattttagaaagatgtatatacatacatatatacatatatgtgtgtgtgtctgtctgtctgtcttttcttatatagctctgcttttacatctttaggaaattcttccctaccatggaagtcatagatatttgcttataaaaattttaaaattttgcttttcacttattgttaatttgcttagagtttttttggttatggcatgagataaggacctactgttttctcctatggatatctaattacaccggtgtcacttaccgaatgatccttccttttctgttagcagttgctacatcgcatctatcgtgtgttaaatatctaatgtgcttgggtctgtttctgaggcatttgttttattgatctgtctgggcctgcatcaatttgatgtctggtagggtgagctcccctatcattgttggtattcttcaggagcgtcctggccattcttggccttatataaattttacatggaatttaaatatatatataatacatatggaaattaatttttaaaatcytgttggacttttaattgaaattgcattgcatttatgaattaattgaaatatacctaattaattgcaaaayaaaaatgtttgagtgtttaaaagaataaattactaggttttacaaaaattatttgtcaagaacagccaatttcccaagggttctgaatactcaaggttttactatattaagtgaatttgaaaagcacaccatttaaaatgttcattcatatattggggtgattcagaaaattaagtgtttaagcatctttcatttttcattatgcttgctaatttcttcatcaagtatttattgattgcttgttttatgtaggaycttctgctatagaatataacagtggttcaaaaatcccaacagccattggtagagcaaatgttcttatttttgtagtgcattatatatgacataattcacatttcttaggtgtacctcagttgatgttggaggaaaatattccccatgtttgctgtgtgtcatgtgtcagatagcccatycttttcaaatttgcctcaaaaagtccacctagtgttcagaaataatggaatgttgactctttttcatctawtcaggctggactaattatttgctaaaattcatttttgtctctctctagagacttgcagccaatacaggaagcaaacagcgtagtcgcctctctgttatggctcagtacctctgcaatgttcgacacatctttacrattccaggacaagcttttgtccccaaaccagaggtaagtttctgcttatttgttgtagtatatcggaattaggacgtttgttcccctgaggatgtgtcataggaaataacctctaggatctaacctttgtttatgtgcaaactgacactgtactttacttctgaataagaaccacaaaaatcgtaatatgaatagctagttcttactataattgttctccttaggtagggtgactaaatgtttaggttcatgcatgttatcctggtggcagtatcattcatcatcttcatcttcatgatgttactcttaaagtatccctgtatggaagataagttacacggtcacccaatatttgagaaaagaaataaaatacttttgtgttttctgttagagacctctaactaaagctacatcaaacattatttacttaacacttttttgggagaccttattatggtagtgttatttgtggtaaatcatctgtggaagaaacagttggatattaaactaggctttgatattatatgctagttatgtgagtaagtgctagttacagaaacagagtttctctgccaaaaattaaaattaaaaaaaccgttgtctgttttagcaaaaccactgcttggtgagttattacaagatgtgtactattaaaaactcatctttttcttcagtgaatgtatattgagcatttactgtttgaaaatgcgttgggtagcaaggggagtctacagggatatgagcctaatccgatacagagtctgccttcrgggagttcacagcctcatgaggaatagaaatttctcactggtccctaaaactctcaaatataaggtcktgcagagtgtcccttgcatcatgtatccttcataaataacaagagatagcatggaaaaaaatgcattatgtgactatagatttagatatagattctagatttagaatggagaccctaaccaatagtgttagatctacttgtctgtcttgaagacgcctaagtgatctccatgctctttgctgccaccttcatacttctttgccatttggccagttagctgagcgttcaggtgactaggaagtcaggccatcttccccttacrtaacagacataattgtcagctttttctaaatcgagctcagggagcttgctatcggtgccacctcccttcagcatctcagacttcagagacattgcgaatgacttctcctagaataattagatycaagacagaatttgatgactggaggtatcttataggttatcttcaaatttaaaacatttgtgctttcagggactttctctcctagtacaggtggccattatratgaaaaaaataaaaataaaaaaccagtgaccatgtagcttgatttcttcttgtcatgcacatgtgtgtgcatataacattttaaatagtgtaagactcattatatcaaaaaccaagatccttactcataggcctctatagttatggttaygaccattatccagaatctccaggctatttaagttttactaacgggttcttaggatagatattcgaatatttttagtggaagctttctaactctgttttagttacctagttgagattatttgatggagtttcgaagttattatccactttatctttgatttagtggtaaggtacatatgtagtttatcaattaaaatttaccttctctgggattaaggccacaagaaaatatttattatttggaaaaaagctagctatgtctttgattcctttttttattgagggatgtttacrttttggcaaattaaacattttcatagcaatttacttcactttttttattatattgtaactattacatacaggggatttatttgtaatccagaaaagcacttatcaaggacttgtaggtgtgcaccaccacaccggctattttttgtagtttttcatagagacaggattttgccatattggccaggctggtcttgaactcatggcctccagtgacctacccgctttggcctcccaaagtgccrggattacaggctaaattttagttctaaaagaattctctgctgctttgaagtagttttaccatattagggcaaagcagaaatgttctgaagaaagccagaaaatattttgctgacagttacattgagcaaatgttttaaaaattcattttcttgggccgggcacagtgrctcatgcctgtaatcccagcactttgggaggccgaggtgggcggatcacgaggtcaggagatcgagaccatcctggctaacatggtgaaaccccgtctctactaaaaatacaaaaaattagccgggcatggtggtgggcgcctcaagtcccagctactcaggaggctgaggcaggagaatggcatgaacccgggaggcggagcttgcagcgaggcgagatggcaccactgcactccagcctgggtgacagagcgagactccatctcaaaaaaaaaaaaaattcattttctcaaataagaaagaggaagagtttttacagagatgataaactaattcaaggctagtactctaactaaaccttctgcatacaagaagagaaagtcctagacgcacataattgcaacacaaggtaagataagctaagcrctaaaaatagaggttgggcagattcctgggtggttgagagagggagattaatgctcagaagaaatttactaacattcattacttattctcaatcaaaactctaagaatcagatatagagaatttcttttgtgatacaatgaggggcttacttacaaccactttcgggattttttcctgtgagagtctgctrtcccttctgtttctcaatcttttaactaactcaatcaagctttaatggcagaactttcactaccattgaactattacaatcctgttctgactagttgaactgaattactgctgaactttactcttattaagctctctagtgtagttcccaaaatttgaacccaaaatactttgtgtctgcaaaacagacaacctctgaggttcttaaaattagactaattaattggtctactttagtgtctcttaaactattagagtctgtagtatgtagcttttaagttagaatttttttaattttgtgttttcatttcactgttaatgaaattatttacrtttacaagacaatgtcttttgcaatgcaaattcagaactaaaattgttttcatgacagaatacaacctgtttcttaagtttctcaagctagcttttctctattagcctctgtagatccctgagaatccacatatttctggggttccacgcttaatcttttttttcagctactctgcacatttctcaagtttgggaaatactgagctattagctagatcctcaaaattctgtcttttttttatgaattatggtgataggcttcataatctaacatagttcgtaaagagtggaaaggctttttagttctcaacactatttttttttttttttttttttttttgagacagagtctcactctgccgcccaggctggagtgcagtggcacaatctcggctcactgcaacctscaccttctgggttcaaatgattctcctgcctcagccttcygagtagctgggattacaggcgcccgccatcatgccccgctaagttttgtatttttagtagagacgaggtttcaccatgttggccaagctggtctcgaactcctggcctcaggtgatccatccgcctcggcctcccaaagtgctgggattacaggcatgagccaccacgcccagccagttctcaacactattctctactctgacttagtagaaaaatcatttagttatattatgagagttgtaacgggttctttttaattgacactggtagaggcagtagacttccaagtaagctagacctgctggaattccagtactgctagttttgagagcttggtcgggttaataggctgagtttactacatccagatttgaccaataataccacccttgaaggacatttgtgaggaatagaaataatcaatgcagagtgcctaatatgagtatctggcagtgaatgctgccagtcaaagtagttgttattgttatgatataaacaaatatttatggactaagttgtagtattctgatataaaaataaggattataatttttaagctatatatagaatttatatttaatttttcctatttggaagtgtggtatatagaacaagttaccttcaaacatggtacacatttaaagcataaatagtgtccattaaattgtagatgaattaatgatatatccatgacatataaagaaaagattggaacttgagacatccactcttgacttttgaagagcrttttagaggcttccaaccctgcttgttcacagctattgaggccttgacctctgtgggagatagtcttgagtttggtgggtggatgggtccacagaagagacaactgtttttcatgcttttgtgttttttgaaatctgacattgaggatgttatttctgctgtatatttaccttgtattcaagaatcattttggtatgaggtcagaacactagtgttttcctacttaactaagactcttctgtctttggtttgtattctcctcctagaatcagattgagatgggattttcataaaggtgatgtattgacaagggccctcaggagaaggggcatgagggtagcaggaaagggcaggggaagagctaagtaaacatattgttcctcctggaggagcttcagcctagaaccacggcrggaggagaagctgtgtagcacaaattgccccacgcgtctgtgttcccttgaggcaagggaccagcttattggaacctgtgccagccagtctttgcagggagcaryggggcagtcacttcccagtagaggcagctccatctctgggagccattagcacccatcagtgccagcagctgggggtggctgccctggcccagtggaaggagcttggccaagacacagcatcctgtctagcttcctaccagtagacaaagctgtcagattacttacatggccacctctctgccgcagttgcttggaagttctaaactaagtttcatgtttaattgctttagcatgcttcaaccaggaacatttaatagcattttttctctcttctttttgtttgtaactttagtctttcatctttatcagttgtttttatacttattatacctgcaattttataagttgcctcaaattcktttttaaagcccttgagtccaaaataaaaataaatataaaccaaaagccatttttataattaaagtagtaccagagtcatcctccttaaaaatcaggtaaaatacgtgttgaatagagataagagtatttgctattacaattttaattcagtactaggcatgcttccataaactgctcaagaataaatggtaagtattctaaatccaaggagggaaaaaacaaaattgcatttttgcagacagtacttttatgtatgtataaaatgcaatgaaattaatacaaaagtaactggagataatgataataatgtgatagtgttctgcagaattataggctaggctaaaaatctcaaaagtcaagtaagttagtatttgctaaagtcatgtagctgacaatatagtgatgaaagacatatgagaaaacattgtccacatccaaaactgaacttctgtctaactaccctagtgggcctgccctccctgcacctcttattcactatgctgactaatggcatcatccacccaggtcatccaagcctaaaccttggaggtcatcttaagcaccacctccccagacctttacaactgctgaccctcagaactagtcagtcgttaaccagcttctgacattacctaaatttctcccaaacccatcccaattttgtacccaattcttctgacttaatttaagtctatcatttttgtcagaattactagatgaattcttcagtcatatgtatagatatacacgtgctccacaggttaaaaaaaaaaaaaagtatgatatttttggtcttttgggttttgttttggtaactttttatcaaagaagaatgaataagtatattcgataaattagactatgatttctcaaactcagaactgttgacatttggggccagataattctttgttgccagagtctgtcctgtgcattgtaagatacataaaggcatccctggcctcttcctactagattccagtagcactacctcagttaagataaccaaaaaagtgtcccagcattgccgaatgtcccctgcaggctaaactcaccccagggagagccactggattagactaagaaccattgagtaacactagtcatatgctttctgtgcaccaactgctttctgtgtatcatctcatttaatccccacgagaactctgagggtagatgccattcttaagcaaaccaagaccttagttaagtaatgcatgctgtgtaaccatgcacccacaccagggcttgcacccgggtagtttgactccagaacctggttccctcaggttggaaccatctccccacttactagctgtgtgaacttgggcaagttagggaacttatgtcacctctgtcgccctcagtgtcctgtaagatcctgagaatagtgcctacctggtagagttgttaggtttaagccaggactggcatgtgttaggttttagaccaggactggcatgtgttaggaagcacttgccatgacatgtcactgagaatgcagagctaaaaatgacaccacacctcccagtctagttggagatgcaatcatgtaaactcataatttcatgacttcttaaatagagcgtttttacacagtacacattacttaagtcttggtgtgctcatgtgagctattgtgaggattaaatgagagcatttattaaattcatagtttgttaaatagagcattttctgcgagtgcagatgcgggcttgaacttctaggctgtcaggattragtttacaggagaggtccgtgtgaatcctgaagggtgagcaggagctttggtagtgagggagtgaggctgggaggagtgcaggtggaggaatgaacacagcgggataggaattcctgtaggaatagagagactccacatcatttattgcaggattgccacttccaaacaatacactgggccattatttcatataaaatggctggttttctgagagtttgaaacattcgtgtttctacttaggaagaaaatactccagagctaaataaaaattatttttgaagtatatatagaatgatatagcagatataaagataacttttactgtaggactaaaggctacatagactatgtaaacccagccacattcagcaaagtgagagaagaactattaatgrgatcaaagcagttctagcacattaatttgcatgaaatcattctttgcatcagaattctttttagtatgacacttgtgtataaaataacattttgaccactcaaaaggaatacatactttaaacaatcatttaaccttctacaaaatgatccccttcctaattcccgtttgtgataataccttttcgttttagctattccagtaatagctaatgacattgttgcagaagagaatgtctacccagtaaaataggtataggatatgttagtctatttctgtatgcacaaatgaaagttatttacttacgtaaaagatattcttcccacttcctgagttattaatgtacaaagaaataatcttttttcccctttaccattgaatcattgacaatgactaagcttcaattaacaaataaattgttagaaacaatagtgggcagtgttkcctagatttttatttacttgctaaaatatttgaatcacatatcataatttatattttaaaagcattctttaaaatatattttgacattcattaattgaaacagcttatttgtaagaatgtttttgttaacatgaatgaaatttgagagaaaaagtgacaaaggtaacttttatcatccaaatatgaataaatgagagaggaagtgggatggtagtaaatccagaatgtgataggataaatgaacttaatctgtggagaatcctcttgctagaagcagaagaagggagttcttaaacattttaaaacaaacttttgttcttatcacttagcttgtacttaatgctttaagagtcctagagattttagtttggtttggctttctttactgtggtagcatttaccaatttcttcagttctgcctaatcttagtttgcatataatattgtcagctcttacaaatatatgtagatagttttctaaaatgaaaaagaaatgggctggtcacaggaggtggggacttgggatggatggttttagcagcatctgaatggagtaggcagctcttgtattcctaatgtactttcacacactgtagctttaaaacagaagcaagttgctgtgttgttgccaaccagatagcaaagtggataatattcttggttaacaccagggcaaggtactttttatacttggcagtttagttcttttataaaatccagtttgaaaggtgtatcagcaaattatcttagaaaaagctatcaaataattgccttatgaatgtaatcagaacctctttcaattataaatctttaagtaaaacatggaaacaataatggaaaaaataaagaactcttcagacasatgtaattgtatatgatagttttattggcattttaaactacyttgtagttgttaaagtattttacattctactttctttgtagggaaagttaagcataattctgatttttttttaatctaaaagtcccatttggcacccaaaagttccatttcatatgcattactcagttatttacacataatccttcagattgtgtgtggaattgttctcgagctgtgtgttagagataggctgctgtgtgggtgggtcgagtctagcttctggattcctttttatacaggaggtgcagaaaatcatgccagagataaacaacagcattgcagaaatgaatccgatatagatagctcctccaggttcatgtttgttgctttctggaactgtcagatccagaaagtttgctatgatctcctttgtgtaccacactgtcgagattaaactagagattcctgcagacatgaaacagactcctccagcaaaggaagcatggctcttggtttctctgtcccctcctaagcgagtacatttcattcctactgtrgaagtgcagatcyccaaagcagacagaacacacgccaggaccatggtggctctcgcagcctgcacgtggatggggagggacagaatggagtgtttcagggcacagctgaacatcccagtgctgtaccacgtacagtccatccagagcccgtgcagctgtacaatggctgttatgatgttggagtccacatccacattcaccttccagttgggcagcagagtggctgtgagcactccagagaccccrgataaggccaggatgaaagcaaggagctggagtcctgctgaggccatgatgttactgttaagtctgtcctcttagaaaatcctgatgtttaacaatgatggctgtcagaattctatctatttctgtgcagtagagaaccaaataacaaagcctaaggaaaaaaggcaaaaccaggattgagcgaaagaaagtaagtaaacraaaggcttccctttagagtaggagccaagaacacatctgagtatcccccttctccagcccccaagcagatgaggatgctgtaggctggaggagaaaagctcccaccaggccttgaagactggtctgagtgatatgcatgggtggtgttgatacagggcataaagaaagcagttgcccacttaattctttttaaaactcaacatatgctgaaactgtagcgtggacatgtacgttgttaggagatttagacatttgaaattccagctatagtatctgataaagaattttaatagcattataggtttttcaaatgattttattttttatttttattttttttgagatggagtctcrctctgtcacccaggctggagtgcagtggagcgatcttggctcactgcaagctccacctccygggttcacaccattctcctgcctcagcctcccgagtagctgggactacaggcgcccgccaccatgcccggctaattttttttttttttgtatttttagtagagatggggtttcaccctgttagccaggatggtctcgatctcctgacctcgtgatccrcccacctcggcctcccgaagtgctgggattacaggcgtgagccaccacgcctcgcccaaatgattttatttttaatgaaaatactcaatacataataaggaagaaaataaattaaggccaccttttaaagatggtttataaatacattttagaaaagtatttaggaagtggctttcataaacagatctttatgacacacccacagtgccaggcacatagcccaagtgaaccatttgaggaggaaggacagcagtggaaagaagtctgagtcactggcatggttatccctaagttctagttartacctgtttgcaaaatcctgactgaggttagtacttgttttacttcaggtgcctggtactcaaaacaattaagccactgttttttgtatataagaacatgaggtcctttctaattgggaccagaatmatttcctggcccaaatgaagccggctattctgaacaattcagaagtagtgatggcagatctcaaaaatacataccagaaataaccacatcattagttgtatgtgaaaggataccagaaataaattaaccctttattttctttgtttatttttaagaggaaggaaaagaccacctactttgtggcttggctgtgttttaagaaacaaaaaggctttsgattccatctttctattcctgttcccctatctagcccatctggcactgcttactgccttatttgagaaaaatgtaatggtttctgaaatactgcagtactgactttctttgtcattctgagttaattttgaatggtatgctaaagtggctctgtcgtgattcatatgtattttacaaaaggtgatacaggctcttgagtcaaagacacttgggccagttcttagctttatacctctctgtgcctcagtatcctcttctggaaaatggggaggattgaaatacttcgttcatagggttaaataagttaatacattttaagggcttagaccaatatttaagccacagaaagtcctcagtaatttaaaattgacatcattattagtatttttatttcttatgtattgtgacaattgatgtttaaaattatttggatcttttccctttttctcttccttccttgggctgatttattttcatagaatcttggagctgaaagaaacctcagacagacaatctcaagcatccttgttttttcaggtcagaatgttcagatagratatcaccccatgtcatacagtcttcagcagccaacctgcagcgtccagatctctctccacccctcctacctcacagggtcatcccgcatcctttccccttttaccacaacacttcctgctgaaattctttctccccctgtgtgtttcccatgggaaccagggaaaacactgtatctggaggcaaaaagcaccattaactgtctacttcacccactcccctccccaccaaggaaaaaaaggactgtagaggatgttaataggccacatggctcagcttcagatgactcagcaaggagattgatgcctggctttggttaaatatttgaaatagtactaatccattgcctatatttaaagtataaactttgcatagctacaaacattgattctctaagacattagatcctagactatctggattgtgctgttctgtttttgttcataatctgaaaatgtaaatcttaccattttagaaaaggatttccctaggattttaagttcttaagagtcagacttatctgtagacatcagtgtgcctaggattcacctgctatcatacagtttcttttctgttttccaaacttagaccaaaatagaacaaaagttaaagtttctagaaaaaaaatcaagcacatgtttacagttttgtaatagctgctttcaagtttaggttttagcatttcggactccagccagcttgctaaattactgcctctggaccattttcagcttagggattcttcaagtgtggggttgctggaacattttctaacagcatctgcttgctcacttttctctctccctctctctttctttctactttgactgaataacctttgttgtcaatctatgttcagcttaccaattataatccttttcttcccattaactgatayattttataactttcagtatatttcagacatgaagacagtttgttcatcatgattaacaagtactggcagtgatcaattacagacagccaaaatcagtgtaaacaatatgacgtgtcatttaattagcatagtgcttgcttactgttgaatattggattcaaatgcttttttttctgcatagagaacttatgtagaaagaatttgttctccaaatgaaggtcactttctgctcatacaaatatactggcattttagctgcattgcgctttaccctccagccacgagtataataccgtttgtggcctgttctctcaaaatttctatctcgtagagaataaaggcacactttgttccagcagctgtggtggtggtggtagagaaatactgtgaaggcaagcagaagcagaggggaggggtcgcatgtaaacacttacatggtctacagtgaaaactctctcatggtcccaaaacacagtgcacacagaacagaacccaggcaccttcagtttatgaactactcgccaacagaaagtctgttgtagatttcactaaaatgtaaagtcagctttccagacaaggtttatttatatcaaaaataatatttaaaagcagatttactgcttataattcgaactaaataataccgaaagacctattcttagatctctaagcattaagacaggttttatttaccataccttttgtcagtagccttcactgtcttaactccttcggtcagttgtcttcaaattaacctcagttagttatggtgaagaaaaaccatatacgtgaggcttatttcagaaattctggatatgtttataaagctccaataagttaacttgaaaaaagcaaataaaggacaacgtagaaatctgagaggtaaaaactgctgatggtgttagaagataaataccaggttctccatctcattttttgagatgtgggagaattaagaaaggagaggcggggaagggagggaattgttgttacaacaggatttgttgaaacctgaaagctaaaaatgcttttgtgtcactgtgtacagaggaggaattatttgggtgctcacaaaaaggccttcttttcttttaatataatgttttagtcacatagttataacttatttttgaaattttctctatgttgaaagatataatgtattattttatgtcctcagttcaagaatgtggtctgaaatatttttaacaatgtcgtgccttgcaaatgagagttgagactcccttttttccctggtattcttgacttgtctggaacctgaattcataaaattgttaattttcaaaataatcattcagaagaaagttttttaacatatgtatttttttcaataaaagaaaaaagaaaacccagcaacaacttttgactagaatctgatcactaaacctacaggtatttttgtgtgtgtggtgccctgagttttcttgttattgcttccacttagatttgtggagtataactatagagattcaggaaatgttatgaataaattacccaaaatgatgtgatgagacacatcagataagactgtgatcagatactgaggttgtagcccatgaataatggtacagatggatttcactgccatccttttgggttctcatttttttcttcctcagtaagttttattctacaagctataaattcatagccattatacagaaagaagataattttattattggatttttaaatttaacaactgttaataaccatgttagactttaatcatttctttaaaagtagtaaataaacaaacacatgtttcggttatctggattttttgttttggtttgttttaatcctaagttttgcattgagcaagatactctttttcctcttttctaagtctaacatctgtgggtttgcttttcagccatagtattgattacatgttaagtcttagctctctaagtcgttgtaagctttatgtgtactggctttgttctttgattttatttcatgggaaatacaaacaattcagtgcataaataaatactggaagaagttgagttgaattgcagacactaatagtcgcagcagtgtcattagtgctgcatccgaagacacctcaccagggccctccagcgtcctggcttgtttcgctggtcgccatggttgttagtgcagacataagctttgtgaggctgactgatggcagatggagggacccggctgctccccactctaacctctagcataaggaagctggctggaggataaatgggttaagcatgctttaatgtacatttaatgtacatttctattctcaaaacatgttgattatttttttgccttgatgaaaacaataatcctataaaatattaattgcctgctttagaaggaaaacttctgaactggaagcaactttcrttagctatagacctttaatgaaggcagaatttcttatataaaaaaggagctaggaaagtagaagtgtaaatagaaatatagttyatcaacattactatccacttctgatgtggacattaaagggatattaatcttttaagtccagagactctcctaggtaagtcttatgacccctcagcttaaatctcttgcccagccctctcccctgaactcccaagttgtgtttctgtytgctgacttggcgtcactgatggatagctcagacctgtcatggcacaaaactgaattcctgaccattcccaaactgttctccccacggtcttcccaggttcattagtggcaaatccttccttccatttggccgcctgagatcttaaaagtaatccctgattccatacccaacatcccttgagtcaacaagttgttttgtttctgacttcagactagaacaagaaccttccacctctgagctcctcttctgcttccactgtagcgcaagacctctgaggtagaagttcagccccacagggcaagcacttctctctgtttcattcatcactgattctcctgtgccaggatcagtgcctggcacatagtagggatacaataaatatttgcccaatgaatgaattcagaaactgactttaagtatataatgttaaactataaattgcacttgaatgattaaaaatacaattttatttctaagcaggactagaattttaagtaattttggaactctagtttgtcatcttgctaataacattatctaccatttataacctgctttccatatgccaggtactgtttaaggtgctataatacataattctcaagacaaacctagcagataagaagaattttatagacaagaaaactggccgggcgtggtggctcacacctgtaatcccaacactttgggaggctgaggcaggcggatcrcctgaggtcaggaattcaagagcagcctggccaacatggtgaaaccttgcctctactaaaaatacaaaaattagccaggcgtagtggcacatgccattagccccagcttctcgggaggctgaggcaagagaatcgcttgaacccagcagacggaagttgcattgagccaagatcrtgtcatagcactccagcctgggtgacagagcgagactccatctcaaaaaaaaaaaaaaaaagaaaagaaaagaaaagaaaactaagctacagagaagtaacttttgactaaggccataaaatgagtaaattgcaggaatggggttgagtcccaaaacaatgatttttgaaaccctgacatactacatagcattgccccacctctaattagaaaagagcatatttgtaagtcctacctctcttggtagtttataagctatggaaacaaattaacccagaaatctctgtagctttacatatcagcatttacttctcagtcctgcaaagtccactgtgggttgagtgattgcagtccatctttcttctttagaatgttttcatttatctttttttttttttaattttttaattttttttcttttttcttttttttttttttaattgatcattcttgggtgtttctcgcagagggggatttggcagggtcataggacaatagtggagggaaggtcagcagataaacaagtgaacaaaggtctctggttttcctaggcagaggaccctgsggccttccgcagtgtttgtgtccctgggtacttgagattagggagtggtgatgactcttagcaagcatgctgccttcaagcatytgtttaacaaagcacatcttgcaccgcccttaatccayttaaccctgagtggacacagcacatgtttcagagagcaccgggttgggggtaaggtcatagatcatgttttcatttatctttaagcagaaattactttagcttcccttagtgtgtggtgttgcttagtgatgttaatctggatgttcaggtaggcttttattgtctttctgaaagaatcagtaatttaactgagtattttggaaataacaataccacaccttttcatagagcttaacagtttataaagcattgcactccatcttctcatcactggatcacagtaacaggcttatgagagagacctctaccctaatcaaagaagcctggggatcagggttaaggggaaacactttggtggctgacattttcttcaagaaggagtttgaaggccaccactagaggcagtgtgaaccatcagagtgtttttttgtggtggaatttgtggtttaagagcacttggctatggtgtggaggatttaaagagatcagaattggagacagacagactctgggaggctgtggtaatgggagcgattaaatggaaataactagatgagtagagatattgcataggaaatggattcaagataaagggtgttcataaattctggaaatataattaaatatatataatgtagtcaagggcatcttcggtctgtaaaaagaacccaaaatttcctgtctacattttgaaaacaaatttgtagaaggggctttgggcttgtattggtttcagatgtttcagtggacaaattacagaaaaatctaacagtagactaaactataaggactcattgtttgaaagtcagtactgttcaaggttagttctgcaatttaaaactcttcttaagtattccagctcattctgtttttctgttccttcaaactgaacttttcttggctgtgtgaaggttgattatacaaattaggtcattcttgtcttacccaactaaatcagagtcaaggggccaggaggaaaaagcactcagggcacatagcactgtcgcacctgctccaaaatttacactttctataagcctagctgctgaaatggcctgctgtaacaccaagaccagttttagctagtagctgctgggaccacctactgtgactctaagactggttttacctgctgtcgtcactcaccartcagagcttgtccacacccaaaagcttctctagtgccaatgagctttctttcaaaacaacacataacatttctctaataaaactcccaaccttccttttgttctttggacatactgaagaccacctggtctgtgtgtaggccctaatttacaattcttgcttcccaaataaaacattgaatttggagatttgtctctrtattttaggtttacttcaacagytatgagatggctgcctcagctgaccctttcatcaagaagcaccatattctacggccaggtgtggtggctcacgcccataatcccagcactttgggaggccaaggcaggtggattgcttgcggccagaagtttgagaccagcctggccaacatggtgaaacccagtctctattaaaaatacaaaaattggccgggtgtggtgccacccacctgtatttccagctactcaggaggctgagacacgagaattgcttgaacccaggaggtggaggttgcagtgagccgagatcatgccactgcactgcactccagcctgggcgatagagtgagactctgtctcaaaaaaaaaaaaaaaaaggcagcaaagtattctagagttctcttcccctctcccaccaccaccccagactatgctttaatgtctcactttccagaactggctcatttggtcattcttttttttttttttttttttttttttgagacggagtctcgctctgtcgcccaccctggagtgcagtggcacgatctcagctcactgcaagctccgcctcccgggctcacgccattctcctgcctcagcctcccaagtagcggggactacaggcggccgccaccacgcctggctaattttttgtattttttagtagagacggggtttcaccgtgttagccaggatggtctcgatctcctgacctcatgattcgcccgcttyggccttccaaagtgctgggattacaggtgtgagccaccgcgcccggcctcatttggtcattcttaactgtgagcgagactggggaagtttgtatctggcttttcatcccccctggtgagctgtatccagcagggactcaggctggctttgkgggtgtcacagggctctagctgcacttctagtgaatttaatctccaggatttgagttgactgtgtgatactttcccaagcaactaggattgttccccaaacctgtgattctcatttctgcccacacgagggctttggaaaagccccaagaggctcaggcccaacccagtggctyttatttaattttctgggatggagccccatccttgtatttttcaaatgctgtccatttaattctaatgaaaagttggggttctgaattttaaaaaaaatgttgtgatggttaacactgagtgtcaacttgattggattgaaggatacaaagtattgatcctgggtgtatctgtgagggtgttgtcaaaggagattaacatttgagtcagtgaggtggggaaggtatacccgccctcaatctgggtgggcaccatctaatcagctgccggctcagctagaatataagtgggcagaaaaatgtgaaaagagagactggcttagcctcccagcccacatcttttctcacgtgctggatgcttcctatcctcaaacattggactcccaagttcttcagttttggaacttggactggctctccttgcttctcagcctgcagatggcctattgtgggaccttgtgatcatgtgagttaatacttaataaactcttctttatatatatatttaatatttacatattatatattaaatatatattatatattatatataatatatatttatattatatataaatatatttaatatttatatttaataaactcatatatatatattccattagttctgtccctctagagaaccctaatacaaatgttttttcttctttgctttccattcaatcttgaaaataatgacagttcagagtaagataaaatagttacctgttccagccctacaaatttaaagtgatttgacctaatcctaaaataatgytcttctgtcccagccttaggaaattaacagtatcagctatgaatakacgaatgtactgaccaagcatcttcagtgtgatgtctagtccgtttgataattatggtttattatgaattactatatttgtatgcatgttctatttctcagtcttttaataatattactagcagcatttatcaagtgccttctgagtttgtttagattgagagcctctctgaggtcctgtcttctctctgagggacgggagttgctcaggacctgcagcgctggggtccagaccctggcagttgccaatgtgctgccacacccatggcccggctgggcagcctcgaagctgcctcaggcagctcctgccacatccacaaacccaagcgggagcacagcccgggacaggaaacacagggcacgtccagatgctgctgcttcacagacaccaagggcgtggtttgtggaaaaggcctagttttaggaaggtcttttccctctgatcatccaggaactccagattaaatrtaacagaaaacctttatacaacaattgtcagttcttgttccatttgtgctttcttgaggattacacgtgcatctccctgaaattgtttaatctcttgggaccaagagacactgactcatcttgttgttgttattactaataggtgtaatttacatacatacatatgtacatttacataatttacacagtaaaaaaactcttcatccccctcaccacatttcttagtcttatttctcttgtgatctgagtttgctgtcattctyttggcctcagttcttcctaccacatctgctctgagaggaaacactatgtgactgtttaaaatctgttctttttttatgatcccaagaagaaagagaaaaaaacaaagatctgtaggaagaaaaaagggtgaggacagaacttctgcagaaataaatattgttacaataacacaaattgtaaactttaggataggtactgaccgtgtagttgatctttattgaaccagttggtttgaaatacttagaatgctgtcagctttaaggttttacagtggaaattctttccttaaattggcttttggacatggatcacaggtagagtgaaccaattccagaaaatgtgatctacattcacatttgtcagtattttctttttctatgacatgcataattatcatatcacaggcatcagtgacttgctgcctctacctgggattctccttacctgggaaagttgtaacctcgaggcccgtgatgtcctaaagtggactgtcattagcttggtggaggtacttgaagagcaagcagacactggagggtggrgaaaccaagcatccggaggcactcatcttgctccgttgttttacccracagtgaagtggctctcccaagcccctgtcctcctgcgttccatcttgtggtgcctatagcctgcaagatgccatatgcttcctgttcccaaccacccaggtctgcccgtgatcatcccacttygaactttgaatccttcttatatgttgttctttaaagtcttactgattattccctgtggtctttttttttttttccactagcccttctgttgtcttaagttatggctgtgtcttggctatttacatagtaacttcctcatcattttttcatctccactatcttgtcctctaatggtcttgaacaccgtgagagtgttgaatgaagacccttttgtagacagtggccagcattgtttctgtgtctgtgcatgtggtcgtgacttagcttttgggcatatgataatcatcaggaactgagttgtacgtctcttcagtgtcctctgtatatcatgttgattacagttctcagttgtaatatctaatatctaagatttaagatttaatatctccttagcccgggtcccttgtgagttccaagtgctgctctgagctgataaccagtcacgtcctagacaccctggcctggaaactaggacatctgcctcgggcctgttatggccaaggctgctaacactgagaaacagtcttagcttgttacagcgttgacgtatagggttagaaaggcaaatatttaaattcattttaaatcctttcatttgaaattttagtaggtcattttggtatactgatggactgagtttggaaaaggctggcggcattaaactagaatattttaagtacttctgatgcctttgtactgatttcttttttgtaatcaaacccattaatagacttaaaactcaaggaagaaaaaataatacttgtaattttaaataagcattcaattataagtaaaaagcatttttgtattcgttaccatagttaccaagcagctttcctatagttctagaaaaaaatgggctccatcattcagagtaattctgaaaggtgcctttgggggaaagggagaggaaggggtggtacaggagaggtcctggccgtcccagaagcaggagacataactggaagagctttgttgacgctgagttttacagaatctcccactaaatagtaactgcatttgtgaggggaattctcttttagccgtgacataatataagccaacttaacagagtattggaattgtattcaaactttagaagtcgacgctatagtttacatggggtactactatatttgttcagggttttaaaactttatttaaatcaagcaaaagttagacacttcctgtatttgcaaataccaactatatctcaaaggaatgaaatcaggcaaataaagatgaggccaaaatttaaaatctaaggaagctgaaagtggcagtttctgtactggaagagagtgcatctatctctgtatttgtgcttttggtcttaatagtttgtaagccttatgtagagttttgataatatttcatggttttaggcctaggcagggattagattttatctcagattttgctaagagtatttcttctggagactagcaggctgctagtaagaattgatagaattggctctktgtcactgggagaactggagttgaagggttacaggagatgagtcctggagaasgggaggcagggacaagggtgccaggaagctcaggggatgaaagggaaatggagagtccagtgagagaaggctggygaggtgtagagagtggccagacacatgcctgacagttgggaccacttctctatacaaatcaggaggaggcgaggtaggcaggatagttcagagtttgtgggaaggaacctgacatctgaagtcagtggagtgtgtcttgggctgctgcctgcactctgccattcatagatcaggtcttctttttccttccccagaactgccctgagctgaaaccacctttcttctctccctatagcagtacatmtaccccacctayaccctgcatccactccacagccccttgtcttcttcagtccctctttccctgatgaccacagacctctccaagctgggcactgttctatggtgcgttttgttaaagtctaagggaagtcctgtaggaagaggtagttgttactaaacttgaggaaacatgaaacaacatatagcacacaattcaaaaaacttactaaaatttattaagagcatttgacatcttagttaagtcactgttcataactactgttccaccatagaatcttcacaagaacagcctgctggacttcacaagaaggctgatggatgttgggggtgggcatttggggtgtggaaaggccgcttggcacattctcagcatgcgccagcccacaccgccccttaccaccaaagccttctatttcccattccatccagtaggagcagctgtagctgacctgaaaccttcggggacaggctcattgattgtttaaatagggaggtgcaagctctcaggggtccggggccttgatgacacagctcaggcaccacaggcacctcccacaagcgcgtcaggctgtgtgaggctgagcacagcttattttcactttcttgtccataaagtctcacatcatattcagttgttttccttctaccctaaaagaaacacaaccagaaaagccagtctcccattttcatctgtttaaggaattatgtagccacaaggatctttagaagcaagtcctcttaggagaaaatgacaacctctatgggatttcaacaatggagttccttttgaaaagcagtggtgcagcccacacctcctaaattgccgtactttcttcgccttttgttgagtctgtatgagatcctcattaacaagtttaacaattcctggagactgaggcttttgtcaattatgacgagacttcccatttcctagaccatggtctccgttagyatttttgtgtgtgtagttactgttttgaatccatttccctctgtctttaaatgtttttcctttggtatttgaatttgtccttgtgaatcaccatgagtccatttttggaacaaatcagggtataaatctcttatmagatatgcctgaaaagttttatcttctgacaattaaagaatctccacagctggcagtagcttaaacactatcaaacagtgacattttttgatggtttccattttcaatttcagtcctgcctatgcctttcggggcatttaaaattgctactagaaagttctgtggcttttcagactacactcatgaattcagtccagctgattaatcagtgtctaccgaaaataagtggtgtctctatctgggaagtttagcactgagtggtccctgggggcctgtctgccatctctctgtgtcttgaagctgctgctgcrgcttatttttttcctcattcaaaaactaaaatattctaatgccatctattatctgctgactgactttamtgatttggattgatttttaagccattgtgaaactgtgttttaaaattaagtgaccatcaagcacaggtctggtggatgtcattagagaacaggtgcagccggctgatttctccatgtcatttgcgaatccagaatgtaccatcttccatgcctagagatgaaaccgaagtacgtggaaaggtctgtttatgaaaacaggctgttgacagcccatcytcctgttttacaaggatgagttgattgatcacactatgccacatatcatgccacagaatgataatatgtttgcttacaacgaaggtggacgtgggcgtggtgcacttcactcccttgatacagcccaagatagagcagccattcaagctggtggaaaaagtggttcagaatgtatttcagttccgaaggaaatactgccatcgagggctcaggtaagaatgccttttcttctcttcagttgcagtctttataaaatcctcaggcactttttaagagtgagaaccttgtttgctctattcttaaagctctgagtattacacttagttcagkcctgtgacggacaagacttcactgccaatgaggagagagcaaagacttgctagacctcaggtggcctctctcagggtggcttaaacataagcgcagcctggarttggtgactgcacagctcacagaggctctgtaccagggagctcgtggttccccagtgaggactcaagacagataataatgggttttttaaatgcttgctttctaccgagttgccctatctcttctttaaggacacacttgagaactaggaagcaaatatgamttctgagcagccaaaatcatatcacgaagtcctcacgtaagcacgtttccatctcacagaaagctgctgctgccaagaggctctcaggaatcactgggaaaacctgacagggcctggtggtctagaggtcgcccacctcgatgggctctgaaggaccacagccttgttgcagatccagaaagagccaagaagctgtttagttaagcccagtgatagtctgcttaagaaggcaggaaagtgtatttgtaaamgatttccatctacgataatctatccatagtccgctgtttaaagaggctcggcgtgagaggcacatatttctcattttctaaaacctcctcacatggcttcattgtaattctctctttcacaaggtccgaagtgtccctttagcatatgaaatgacagcagattattttaggggccagctgggcatcagctcctaagagtgctgcagtccacaaagcccattgctgaggatgccagatggcagaagctggagcctcagcctgccacttgttgcctctaattaagccagaattcccaccttaccagatagttcctgcttctctagcagagacttaaggtgcagagctggtgacagagatgccactggccagccattttggctgcagcccccagctactgtgcactgctggtgagtgaaacagaagctggatttcggctcacacttacccctcacgcagagcaggacccacacagctgtacctgatagccctgattcatgggggaggggggagcacaaaactatgtccttttatgtgcttttggaaatcctggaattggtctgagcctagagctggcactagcgtttccaaggcaaccccccagctaagtgaagggccctattcatttcagatacaccatcctcaggacagacatggaccagatactgtgccacccagggtaacaggtcaaaggactttgacttattggtgttcttcagatattagaaactgccatcaggccctctttgccatgaaactgaactcaaagatctgtcacctcaccctgaaagtgtgggggacatgcaattccttgttgaaaggaccatcagcctataagcaacatgctatctatctcccctggccatgacaccttccaagccccttgggatgagctctgtaagagccctgagacttgaagaaaaatgcaatccaggcctaactccgcagcatttcaagcagttctgctattcattttaaaacaatggttcaatttggatagatgaaatttaaaatatatcctctacttcaaatcagttttaaagatgcttgaaaaataacaagaggaataattatattttcctatcagctatattttcaaacttttagcaaaaaaaagtaactcttttagcgtgaagagttctaaaggctgatacattcaaattctagagaatcaaaactgatgatttgtcacacaagaaataatacaactttcacatcgaaacatgaggcacatcaagcttatgtttctacaagaatgcagctgagcagatgttactttaaacttacttacttacctttaaaaagtacatgtactgatttagctttggagaatgctttcccattgtgtgcttgcctcgcgcctcaggttagagcygcctcagtggcgggccgtgcctcttatctggtgctatataatccaagaggctcctgccactctctccagctgtcagtagccagcaactgtgttgtgttgttttcaaatgagggttaaaaagtgtcatgatttgcagaatttaagtaaaattctkatttttctgtctgtctgtcttcccctcagaatgttattccctgaagcgcagcgcttggaaagcacgggcaggctgttagagttggcagacatagaccctactcttcggccccgccagctctccatctcacactttaagagcctctgtgatgtatacagaaaaatgtgtgatgaagacccacaactctttgcatataatttcagagaagaactcaagcgaagaaaaagcaaaaatgaagaaaaagaagaggatgacgcagagaattacagactctagctgctgcctgggggcgagcagcctaccagatgtcgatttgcactacgtggagcttcttatataggtactcttttgtctttacagaatgacgatacaaatgccaatgaccagatgtgacttattttccttttactatacagcttggcagagaaaataaatatcatcaaataagatacagtacaagctttcttttaatatatactgtatagatagwtatgacatgtttagtataaacagcatctattacaatcttacaaaaatgaagtatctgcacattttgcycctaaaccacattaaaataacttaaatatgctttaaataaagcaaaaactaacaaacagctgaaagaaaatgcccagaggatttwaaaaaatggccctttgaaaactattaatcacgacttccccagccttactttttccacataacttaattattagaatgtaattttaaggatcctaaatcatttgatacctgctcaaagtggatataaactaagtaatttacagattctgaccagtttcatctaggtttctgatccacaataaattaaaataacttaaatctttacaaccattttgtgggaaaatgtatactgcacaaaacccaggaatgaacagtttttttttttttttttttttgcaatttccactttaccaccagtttaaaagtaaaatgaggaatttaacccatatctggattgaatcatactatgattttccgtggctctctgtttcataaaaacactcctcactgacaacagatgttaaactctggacactgaattctcgctctagaacagaatttaggtcgatggtggcattttcagactgactgtcaagggactggtgacggatctgcgccttgagcaaagttcctctgtccctcttggtgctgttggcttttcgtttaatggggcagaagtgcccccggaccagtttgggctgctctcctcctttctgaccctcacccgactccgggccaggctgctgctcagcctcggggtgaacgtctgggtcctcggaaatcctcagtctctggaactgaatttcratgtctttagtagggctgccctgcttcacagtctgacggtggtcatcwtcttcatcgctcaggatgtcactctctttgatgagattgtcrgcaaaatctgccaagccggggtgtgggtatttcccgggagaagtgctcttggagtcctgcctgccctcagccgtggggcagccgctgctctgggtgccgctgctcargstgccctygtcagagtccagcaaggttcccttgccagtctcaccggtccactcgttgctggaggaattcttcaggacttttaaagacctggatgaagctacagtgagaaaaacacatttcgctgtgatacagaaacaggttacacaatgtgtaatgtttgcctcaaagcttgtgtaagatttaacattaagattttattttatgatatgacttcagttagcaactatcctggtaattaggcaaaaatgtagctactgaaaacatggacatttttgacttaggtttacagttgtaagttaggcaattcagcatttttagattaccagagctcaattatgtaaatagaactagacactagaaactactacatgggctaagattcttattttgccaaggagtaagttgaaaagttaattggtaataataaatctaggctcctttctttcactaaggtgctttgtaatttgatcatgaagatcacaccatattcctatgcatcttctcaccttgtggatttcccttgctgctcaattaaaagtagaaaatgcccctccccccccccttttttttttaaagacagtgtcttgctctgccacccaggctggagtgcagtggtgtgatctctgctcactgcaacctccgcctcctgggctcaagtgatcctcccatctcagcctcctgagtagttgggactataggtgcgcatgatcacgcctggctaatttttatattttttttgtagagatggggttttgccatgttgcccaggttggtctcaaactcctgttctcaagagctcaagggatccacctgccttggcctcccaaagtgctgggattacaggcatgagccaccatgcccagcctagaaaatgctctttatctctcatatgagaactgtctctgctggaatttcaaaacaactttctgaaattttatgttataggtgtgtgtgtgtgtgtgtgtgtagttctgttctcttggattgaaagaaggaagggagttctcagttttggtgtttctacaaagtaataacagcatgttattttgatggccagtttattttgacaatggagaaaatagtaaatatgtggtagatctgaagaggtcacactgatttgacatgaaaaagcgaagttttacattttctaagcctaaaaacaagaaagataataacaaaatagttaatgtagaaataaggttctgaaaacttaagctgaaattttagaaacaagcagaaagaacaacgtgatttgaaatgcttacttggtgccctatcgattaagaacgagtataagaggccccttaacttagatggcattacatcccaatcaacccattgttaagttgataatatggaaagtcgagaatgcatttaatgtacctactaaccactgcggcttagcctagcctgccttcagtgtgctcagaacacttacattagcctatggttgggcagaacacaaggcctgttttataattaagtgttgagtatctcatgaaatgtattgaatgctgcactagaagcaaaaaacagaatggttgtctgggtactcgaagtacgatttctactgaatgtgtgtcactttcacaccacggtaaagtcgaaaaattgtaggttgaaccatcagaaggtggagaccctctgtgtaaggttcttgatcttcattcagcattgaccttcaggatgcctggcactgttctgagcactgggaatacagcagtgaggaaaacaaagtccctggacccatgcacatcttagtggaagaaacaaaatcgtacatttggactatgtcagcgggtaggaagacaagggactgggggttgggggtggctgtattttacagtagaacgtctgggagcaagaggcatgtttaggtttcttaaaaggagataaaggtacctcgatgacttacaaagtgaaaagtcacagctatgttacaagagcatatatccttttcagaagctcataatattttgttgaataaacacaaggctagcaaaattctcacctaatttggccgaaacaggaactcggttcttaagaggtaccaggcgatccttacacgttttctccagtggtaattcacactttatgtgacgcctgaagttytccctcagaatagaacgaatcaccttaacaatgttggttttgctttcactgtcactgggtsgggggggagagaaaacagcagaagtgtccacagtgttcatcgtgcttccattccacgcccgcctgtgttcctgtgccttgcacctgctggaccaggctgccagccagccacccarcagcagtgccatgtggcctcccgtacagaaggaggtgagaattgatcactcttaagattttgatatttatttaatcaacatagtctcctactagcggcctcagttgcctttttcggagggtggggagtatgaccctgatatcatcaaaattcaggagggcactaaatataaattcccttaagagacataattctatgttatttctgttggttttaatctttggaagtcagtcatacctgcaacacaactgaaagatggtttctggccgtccttctatttctgacttcgtatggatcagttcccatatggaattattttctgtccctatgtaaaaggaaatggaaacaagagtctacaactttgcccaaaatgctgtggttaagaacacttgtaaagttgaaatctcatcagttaagaaagtctaatattcccagtcctggctcattttcttctgtggcttgttctatgtatgattttcacagttacaagaactgaaatgccttttggttactttttacatttcctgctgcagattttcctccatctgaactgccttcaccctctctctggagcccctctctggggaagaggagattcagtggatcctattcttcaacctcctttgcagttttgccctttccttggaaggaacaggagctggggtacttgaggtaaaagaggcctgccccaaatgtggtcattttctcgaaaacataagcacttctgacaaaagttaaacagaagcccagcaggtcactgcatgactcagcctgctggcctcttctgtcaccagatacctgtcaccaaaacaaggttactctggaaggatctctgaacattttccagagtcaaagatttttttctttttatatcacctacagtactacctaaccttaaggaattttctgctatattctaaatttgtaaaaacataaatttgtggatctttgttcttctaacacattttagggtatcaaggcagaaaggaaaatgttgaaaactattgatagggaaaataaggaaacaatgaaaggcatttggcaaagaaaaagctatccaccagcatttagtttctcccagaagtctgctaaggaacatcaaaacaacctctcttgtcctcattttccttgtctataaaataaaaggcaccaaaaattatccccaaggtcctttcttaatttacattccacagttaagtctactaaaatgctttttctggcatcgtactgcacgaaacagttacctgctggattccccagtctgacttgaagcgcggagatggggatcaaccagcggaatttaaatgggtccaagtcagtagagttgtgtgcaggccgggaattcgagggctgtaacatgaaggcccaccaagaaaagtgttagggaagctgtcactgagggaggatgtgtgcacagtgaatagaagtttatgttctccctgtgggcgagtctccgagcagccatgtgggtgttcagggcacagaagtcaatcagctacgcacccagttctcaaagacctcacatgctagggaaggtgcggaggcagagttgtggttcagaagcagttacaggtctcaaagcaagaacagcagccaaagcttccacgccctgacgctgcctctgaatggtaaaccaatggcatatggtatccacagctaggctttgcttttttctgagtgaaggtaaaaggcatttgaaaataaaccaaagtttcacagactatgtttatggaacaaacatgggccattttcagggatataaaagtcgatgttctatgtaggcccccatatgagtatttatctactttatttacttatttatgtatttattgacagggtctcactctgtcgcacaggctggaatgcagtggcatgatcaaggctcactgcagcttccacctcctgggctcaattgatcctcctgcctcagcctcccgagtagctgggactacaggcacgtgctaccacacccagttacttgtatttttggtagaggcagggtttcaccatgttggccaggctggtctcaaattcctgggctcaagcctcagcctcccaaagtgctgagattacaggcatgagccaccgtgcccagctgtatatcttcttttaaaacagacatctttcatggggagactcagaaacgctctcagtatgtgatggggttagttaccctcagagtaagcagtatcagtcagcccagccttggtgctcagtgggcttttcagttcaacgttaataggaagatacagctatgaaaaggtagcttaaattaaaatgaatttttgccttaccaatttctttttcagtttgcagttttctttataaaccagtatgacggctctcttaaaaactaaagaaaggaaaagagaaagaaagtctttattttatgcaaactcttccaaggttaaactagagctgaacgtcttaacagagtaacactcttcaaacgtatgagtctctaagacctcactctgccaacatgagtgaataaatggtacttccctttcgctcatatttgaactatgcagaagcacctgcttatttaaaagctactattagaagttgatcttggcttttttaaactctttgttttattgaaagctgaggacactgtgttcatctcagtgacaatatactgtcacttgttctcccaactctcagaattaaaacatttgaaatacagcagactattaagatagcaggtttctggccaggcacggtggctaatgcctgtaatcccagcagtccaggaggctgaggcaggtggatcacctgaggtcaggagttcgagaccagtctggccagcatggtgaaaccccatctctactaaaaatacaaaaatcagccgggcgtggtggcgagcacctgtaatcccagctactcaggaggcttaggcaggggaatagcttgaacctgggaggtggaggttgcagtgagcagagatcacaccattgcactccagcctgggcaacaagagcaaaacctcgtctcagaaaaagaaaaagaaaaagatagcaggtttcaaaatagccgcagggatctgttcctgtaacacttggcctgagccaagcagcagaagggagaacaagataatgaggatgcagagcgatgccggagtttcaaatagttgggggctggccctgttaagtcccc

SEQ ID NO: 95547 - DNA, 14492 bp, Homo sapiens
ctcctgcctcagccactgggatcgctgggattataagcgtgcaccaccacactcagctaatttttcatttcaccatgttggccagactggtcttaagctcctggcctcaagtgatccatctgccatggcctcttgaattgctgggatgatacgcatgtgctaccacgcccgacctcatctgcattttaataagatgtctcagtgacttgtgtgtacattaaaatttgagaaacattgatgtaatccagatggagtaactggtgcatagaaagtgtttaatagatactagccattaccctttgagttcttaaaaccatatgattatttatattctaatttgcatttgagaagattaacactatttgtaaagaaaaggactagggttataacctagatcttttgattccaaaacctgtgcccttaatactgcataaccttttccccaaagtgaatttcttgaatagtgagggccttggtggctctcacctctccttttaactctccttaatcaggcaccttacttttgaaagtccagtgatgctcatgaaggtgctcccaacagggttcccttcctgaacaccatgttgttttccccagtcagagcactgcctgttacttgctcggcaatcatattcctgcaggttgcagcaaaggctagtcatgttaatccctccagaggtgttttctgccttatgcagggttttctgaatgtaatccttttgctcaaaggaagtactcctcaggaggaaatgctacactttgtaggattagagggggtgtgttttagcatggaaatgggagtggggtggtgtgtgtgtgtgtgtgtgtgtgtgtgtgtatgtgcatgtgtatgtgtgtatgtgtgtctgtagagatttctccttgcatccctgaatcccaactcttgacagacacctgatccatttacgtgaacagttttacggagaccatttgccccattctgattatggcacttaagaatttaagtaggatttttttgtttctgactttgctttcaagttttaagaaacaagctaatagactggaggcttactgtgatagatttagccatgtctctttctcttaattgcttcatgtttaaacttgaggtgcttttcaatttgctcttgtttctcacctcacaggcactgactgatttagtttcttttagcatatttgctaacaggaattgaatgggcttgctgattcccattagaactgttttgagttggatagcttcatttaaaatggaagattttatgtacaatttttgtttatcccctggttttgtctcttggattaagaatattccccagataatgaagtcaaaagtctagaagaaagcaagttaggtctttaatagttttccattcttcttttgttaatttttattatctacactttgacttgtccatttaggatatctaaatgtgtctttgtgctggggatagtataatattgtagaggaagataacgcttttgcaggcttatttggacaggtatgaagtaaatgaaaaaatttgctactcccatcctagatcaacttggaaagacatttctttaggactaaaatgtgatagtagagaaagcctaccattggtaaatgtgagactcaggcaaatctggtaggtcacatcaagctattctggttccagtgatatttgcaaacaagaatttactaggccaccataatgaagaaatgcttctctcctttgtacctgttttcctatatacatacaatacacacaatgctttgcctttaatgcaaatcattttaagacagtatgaatttggaaatttctaatgacatagaatattgtagttgtcatatagttcaaggtgaaaaataatagtctatcaagtggcaccaatcttaaacggtgtctatacacatgctctgtgtgtgtttatgtgcatgtgtgtgtgtgtatttgtggcaggatgaatttcagtccatcagctcaggtgggtaagtactgtgactttctattctataactcaacttagttttttgattttgagctcctagtttgttaagagtgggcagaatattagccctttcctgaagttccacccccacatgaccatcttggtgtggttcaataattccaagaccctactctgtttcactgaattgaagtaggggtagggaggatggttgctggcccccatattgccattgaggtgtttagagtcctggtgcccatggtccctcaggtcccactttttgctgtgtggtgtcatttttagggcatagaaatccttccctggcctgtctatggtcccgccttcccaggcatacaatgcagttgacctctgggatatgaccatctgaccatatctttggttcttgggaatcctgctctctttttttttactccttccaaccttgaggaatcctctcctggtcttagagaagtccatcttccttcatatgtatgcttgctcagtcctctccttttaggcttttgggtactaaagctgggttttctactggagagctcatttctgccctcccctgaggtactgaccatggacctaaatggggaggggacagtgggaagaggcagatacagaaaatacttttttgaatagaaggataacacctcaaagtatcatctctgtacatatcctaggatttaatcatgtatatttctttgtgtcaggacattccagaacactgtgctgctggcctttccttcaagttgcagagtctgcaagtgacgtgaaaccaacaagtgttcatccattctccctaacaaataggctatttggtataagagacaaaaattgtgaagtgaaattacctttctgttacaagtttctaaggacaattaattttaggtggttggcaaatacaatgtgaaaagaagtggattgttaagtagctatgtgagttcagcttttttccccctcctaatgaggcacttaaaatcttaccttttaagtatattgcttgattattgtgaattatgtttgcagtgtgacaaatatttttaaaaaacaaaggatttycatggagggaaatcaaatcaggaataaatgtatgggtgtgaaatcctttcattgctacaataataggataatttatgtaatacctcaagcatccaaatcttttaatagcttttttgaaatataaaacactgaaaaaaatcagttatgcctgttcccgcccttactgagtgtttatttgaaaaacttcttgttccgttaatgttctcttgaaaaataaaagcagccttgtctggaatgaaaagaattgaattcttatggttttcttctcagaaatttctacagtagttgtgggggaaatgttttcctattaataaggtttatctttttttttctttcagtattctgataatagcttatgacgccatatcccacttcaaatttttagcacttgttcaaagctcatgtctaaacttttatcagattacacttttctctgttagattaaccacttcccaggcccacaccacctaacctctagatgtccatggtaaagtaatgaatctcaaactatccataatgaaggaacaagtttccaaattcacactctcaattcttgtactcatctcacagactgaaaacaagcagctggcagattggccactttgtttacagctctgcagactgtacagaaagcatggtgcaggcatctgcttctggaggggcctcatggcagaaggcaaagcagaagcagatgtgtcacatgacaaagacaggtgcaggcggggcagggcatatacttttcaatgaccagatctcccaagaagtcactcactatcttgaccacagtaccaagaggatactactaaaccagttatgagaaatctgctcccaagatccaatcacctctcaccaggccccacctccaatactgggactacagttcaacttgagatttgggtggggacagcatccaaactatatcactatctttaacactctcccttgccattccagatatcttcctaaaatacttccgcttcctacaatgaaatccctgctcaccatgccaggacctaagacgctgcaaaatctggccacactctacctgtgtcctagccacacatcttagccttctctatcattctttctctttcctgaaaagcaattcctgagtacccaaccagaaagaacctttgtccctcacacctggctgcattgatttctagatttgctgattgccaataacatattgaaatacaaactgctctctaattgtcttcttttttaaatggatggcttattttaattaatgagtaacttgtggatttggtgggcaaaaaccatggaatgttcccagtcaagggaagggtgacacagggagcaggccaccatgtctacaagggctgaggtggaggtggcataaagagagacaggaattcttaaccttgggtctttagagagattgtttgggagtgtatccctgatctgaagaggtatgtgtgtgtgtgtttgtgtgtctgtgtgtgtgtgtgtgtgtgagcacacatgcagaggagagtatttacagaggggagtactacaacttctgaataatctatttttaattgagtttttattgagataattatagattcacatctagttgtaagcaataatacatgcagctcccatatatcctttatgcagtttccaccactggtagcatcttgcagtgctatagtccaataacacaagcaggttattgacattgaatcaatccacctgtcttattcaagtttccccagttttttgtgtactcatgttgatgcacatgtgtgtttagttctattcaagtttatcaaatgtgaaggctcttgtactaaccatcagagtcacaacacacaacagctccatcaccaaaagtacctgtcctgtctcccatttataaccatactcactccattcctccagccctgtcctgatcctaaccattggcaacagctcatctctcctccatttctaaatttttgtcttttcaaaaatattacataaatggaagcctatagtatgtaacttttggagattggctttaaaaaaaaaacctcaacattactctctggagattcatcttagtggctgcatgtaccactagttagttcctttttattgctaagtaagtatcccatggtatagatgtatcaatttgtttaaccattcacctgttgaaggatatctgagctgattccagttttaggctatgacaaataaagcttttatgaacattcacatacaggtttgtatgtgaacagaagtttttatttctccgaaataaatgcccaagacttcaattgctgggtcatatggtagttgcacattttacataatccttaaaactcactatttaaaattgcttcccaactccacacttctgtattatgacataaagtttggttgctggaggagctatgactctgataataatccctgaattcaacctttttacttttaaaagtttttttgcctccttcaaaataatcttaagacatatgtatcatattatactttcagcaaaaatataagcttagtggaattttataggaaattgagacacagagaaattaacaacttgggtcatacagagaattaatgtcatggtctgaaacaaatcccaagacccttagagtgttaaagctatatttggtgacacattaatgggtcatgaaatcaactatgtcagccacaaccagaatgtttctacaaagatatagaccaaactagaatccaaaatatcactgggcattgcaaatagcaagartatgtattatataatttttgttgcatttttatgtatatgtgtgcgtatccaattacctaaaattggatgatggttagaagtgctggaaaactctgttcttacagcttagctcttttcattgaaattcccagataattatcttgtaatttccctgtgcctaaaaaagtcttatagtagtcaaactagaatagaggtacaatttgtaattcttaattaatatcagaataaatgtgagttagaaagagatcttctcgccggtggggccggctgggactcgccgctcgcacgcccttgggcagcggcggggcgcctgctcttccttccgcttgcgctgtgagctgaggcggtgtatgtgcggcaataacatgtcaaccccgctgcccrccatcgtgcccgccscccggaaggccaccrctgaggtgattttcctgcatggattgggagatactgggcacggatgggcagaagcctttgcmggtatcakaagttcacatatcaaatatatctgcccgcatgcgcctgttaggcctgttaacattaaatatgaacatagctatgccttcatggtttgatattattgggctttcaccagattcacaggaggatgaatctgggattaaacaggcagcacaaaatataaaagctttgattgatcaagaagtgaagaatggcattccttctaacagaattattttgggagggttttctcagggaggagctttatctttatatactgcccttaccacgcaccagaaactggcaggtgtcactgcactcaattgctggcttccactttgggcttcctttccacagggtcctatyggtggtgcyaatagagatatttctattctccagtgccacggggattgtgaccctttggttcccctgatgtttggttctcttacggttgaaaaactaaaaaacattggtgaatccagccaatgtgacctttaaaacctatgaaggtatgatgcacagttcgtgtcaacaggaaatgatgaatgtcaagcaattcattgataaactcctacctccaattgattgacgtcactaagaggccttgtgtagaagtacaccagcatcattgtagtagagtataaaccttttcccatgcccagtcttcaaatttctaatgttttgcagtgttaaaatgttttgcaaatacatgccaataacacagatcaaataatgtctcctcatgagaaatttatgatcttttaagtttctatacatgtattcttataagacgacccaggatctactatattagaatagatgaagcaggtagcttcttttttctcaaatgtaattcagcaaaataatacagtactgccaccagattttttattacatcatttgaaaattagcagtatgcttaatgaaaatttgttcaggtataaatgagcagttaagatataaacaatttatgcatgytgtgacttagtctatggatttattccaaaattgcttagtcacyatgcagtgtctgtatttttatatatgygttcatatatacataatgattataatacataataagaatgaggtggtattacattattcctaataatagggataatgctgtttattgtcaagaaaaagtaaaatcgttctcttcawttaatggcccttttattttgggaccaggcttttattttccctgatattatttctatttaatactcttttctctcaagaaaaaaaaaaagtwtgttttttctttwttgtccttcatagcagrccaagtattgcctctctgcmatagacagctactgtcaatacatgctgtaatttgacattctgggtcacagatataaggtatttaaaatctatttatgctttatagagaaaccagacattaaaacttcatgcactacttatttcgaattactgtaccttatccaaatttacacctagctattaggatcttcaacccaggtaacaggaataattctgtggttttatttttctgtaaacagctgaaagaataattagatcatattctagtatgttctgaaatatctttaagactgatcttaaaaactaacttctaagatgatttcactttcccatagcatagagtttactttgtatacatgtttgaaaccaactactgtaggagatgaggaatttattgtaattttttgctttactttcatctgccagtggacttatttgaaattttcactttagtcaaattattttttgtattagtttttcatgcaaacataaaaatagcaatcattttaaattgtcaaaatttccagattactggtaaaaattatttgaaaacaaacttatgggtaataaaggctagtcagaaccctacacataaaatgtagttaccatacagattaatatgtagcaaaaatgtatgcttgatatttctgaactgtgttaatttttctgctgtattccagctgaccaaaacaatattaagaatgcatctttataaatgggtgctaattgataatggaaataatttagtaatggaccttataggatgttaataatgaagccatatgtttatgtctggatttaaaaattttaaacaaccatttactatgtcatttttctttaccttggagaacataaactgttatttcacttctacaaatcagcaagatattatttatggcaagaaatattccgttgaaatattgtgctgtaacatgggaaaatgtaaatgtttttcatggtttctatcaatgtgaaataaaatttaattctgaaaaaaaagagatcttcttttatcagaaaattattaaaatgctatttgttgctttatggaactttactttcttcatcacttaaaacagacttcttacacagatccttccagattatagaaaaaagggaatactagccaatcatttgataaaattagcttaactttgataagtgatataatttggctgtgtccacacccaaatctcatcttgaattgtagctcccataatccctacggtcagaggtaattaaatgatgggggtggttttttcctgtgttgttctcatgatagtgaataagtctcatgacatctgatggtttataaagggcagattccctgcacacgctctcttgcctgccaccatataagacgtacctttgctcctccttcaccttctgccatgattttgaggcctctctagccatgtgggactgtgagtccattaaacctctttttctttataaattacccagtctcaagtatttcttcagagcagtatgaaatggactaatacaataacaaaacattacaagggcagtacaagcagttagatgctagaggacttccccaagtttacacatttagaaagtgttagggccaacacccaactccaaactttctgacacccaataatatggttttcctgaaactgtactctgactctttgtggggtattttcaaagcagcatattatggttaagttgattttgttataaacagactggatatgccagcactttcacataaggtttatttaaccgacaaccaagaagattacggaagccagactgactgtctacaaatactgggcagggctatcaggtgggaaagggataacattgtttctgccttacagcaaaggcagaattaaggtctaagtttggcagttagaagtagggaaactggttcaccagaaaaaaagacatttctaagtaagctgcccaggaatgaaagaactgcctaacacagtcttagactaatcaaatgaagtattcattaacttatgagaaaaccatgtattctggctgctggagacaaattctttcattggaccaaatgttctttaaggtcttttccaaatccaagttcctaggaatcaactgataaatgacttttccccattagtcatttatctctgcacattctgcccacataccacattttcttgcaatctgtttagagttgaagaaattatttctaattgaaacctttactaccatgattttatttcaagtagacataatttatcaaacactgagcttaagaaatatgcatttttttcctcatagcattttgagttgggtcataaactaattaattcatattgtggaatagattagaatggaatggaatggaatgtgaaattcagtattatcaatataaaatagagcctgcttgctcataatcctcaagaagtatgtagggacaggttggaatcaattgaaaattgcaatagagagaggaaaggtgatttgcccattcatggggacaataagtgattacatagctaatatatggttatacaactaatgagttctggacctgttaatattctttggtgactccttgaataaatattaaactttccacaagagactacacacaaaccgaaactactgacttctagtgagggcattttcaagaggttctagtccaaatgaaagttatttattatttatctaataaaactcacttctactttgcctactagtatgctattgaaatgttaaaaaaatagaagatgctctcttcttttcagagtgtttcttttggaaaaaaaggaggttgctttatagagagacatttctattctgaaagcaaagcattctaaaccatatgattttaccccatggacttaaattttaaatttctctacatagcatattgaagcctgtgccaagtgctgtctggaaaaattgagtataattaagacaatcaagtgattcagtccctacctttttacattgtactgtcaactaggaacaacatgtatgtttcttcttcttccatgtacttttcattttatcctgttgtatttgacatcaaatgtctgtctgctgcaccagagaaaagagtggatgttggctttgatgtataacaggtgtcattcataacagtaacaataggggatttggttagattttcatctgtaaaattctagagacttgatttgaaaagatataggaaggagcgatgaggggagttggtaatgtgagagtgaaagcgattactgtgcttgaaggaaatatgtaatagagaaggttgaccaggttaggaggagaactatattttcctccctagggcttcttgtctctgtaacttgctgaatgacccctttgacatttaaaaatgttcacacgtcaagaggaagatgacaggtagggaagccaacctgaaaatcagcctttgcctctgctgcttgagcttgttttcctagtaaattacctctgctgccgatggcatcgcagatctgggcatcttcacattcttcctaatactagagagcatgctaaagaatttttagaaattgttctttgtagcttcagactgcaagagatgtaagaagtcccacatgttgccggcagccctaagaagttatttagacagattccaattgacataatttatgaaaaactgaacttaaaggattagtaccgaggggactggcagaagccttttgctcttagatttgcagcaattgtttacactagaactataaggaggagagccagttctgtgtgtttgggtagagcggtaccttagcttcttggcccttttctccccctagacaaagttagagcagcaatttttatgtcttattccttagagagaggaattttggtgattaaagaggaagcaaaagatgctaaaagttccaatttaatttgatttaatttcttttgagacagaaactcgctttgtcacccaagctgcagtgcagtggcatgatcttggctcactgcatcctcaacctcccaggctcaagtaatcctcagcctcctgagtagctgagactataggcatgtaccaccatgcccggctaatttttstattttttataggaaggtttcatcatgtttctcaggctggtctcaaactcctgggctcaagtgatctgcctgccttggcctctcaaattgctgtgattacaagtgtgagccaccacacttggcctgatctaatttaaagatatttttggaacaaacaagatgactgatcaaaagcaggtgtggtctgcagcactcacagaggggaatgaaaagggatgagtgaattcagcaccttcaactgaaatatccaggttctcacattgagactgactaggcaaacaacttgacccacatggaactgaggaaagcaggagcggggttggtggacattggcccacctgggagccacatggagccaaatgaaccccccacccccagccaagggaagcggtgagtgattgtgtgacctgcctgggaaactttgcaacccacggatctggagatcctgtcgtgagcccatatcaccagggccttgggtccgatacacagacttgtgtggagtcgccgcagagcagccactcagtcacacatagagacccaggagttttacatactccggccccaagagtatgtaaagccctgcacatcctgcacatatacccctgaacttaaaatagaagttgaagaaaataaaataaaataaaataaaatatttttgaccatttttgtagtctgtttttattttattcttttacctatttactatatgctttaaattgtcatttttttgacaattatagattcacatgcagttgtaagaaataatacaagatactatacaatgataatatcttgccaaactataggacaatattatacccaggatattgacattgatacagttaatatatagaacatttccatcatcacaagggtccctcatgttacctttttatagccacatccagttccctcccacgtcatcctggctttgactcctggaaatcaataattttgtcactttcagcaatgttacataaatggaatcatgtattctataacaagtgagattgactttttcacttcataatttgctggaaattcatccaggttgctgtgtgtatccatagttcattccttttcactgctaaggagtattgcacagtattgcacagtttgtttaaccattcacctgttgctgaatatctggactgattccaggtttggttatcacaaayaaatatgctaataacatatatgtacaggtttttgtataaacataaggtttctctttttttatttgtcagttctgctacggatttgtcaactttattgatcttttcaaggaacaagctcattgatttatttacattttctaatgcttttctgttttacttcagtgattcctgctcttatctttattaccttcttccttctgcttgccttgggtttatttgctttctgtttttctaggtttttgaggtgggaccttacgtgattaacttggcactttttttcttttccattctatgcattcagagctattaatttccctttcttcactgttttagtcatgttccacaaattttgaaatattttatttttattttcattcagtcaatgtatattttttaaaaaattccttgaggcaccctctctgacatacagcctatttaaaaatgtattgttgggtttccaagtgtttggagattttgttatttttttggttattaatttctaggttgattatgttgtggttggagaacacactgtataagtttaaatattattattttaaatttgttgaggtatttttatgacccagatattgtctactttatatatgttctacggaaacttgaaagtaatatgtattcagttgttggtgggtggagtattctataaatatcaattagggtgttggatgataatgttgagttcttttacgttcttgctgatttctatctagctgtctcaagtgttgagagcagtgttggagtcttctactataattgacgattgtgtatttctcctttagttctatcagtttttgcttcacattttttttagctcttttgtttggcatatgcacatttaagatttttatgtcttttggtggatttaaatttgctttgctaatctctattctaatttatgtatttaggccatttatatttcctatcatttttcatatattaggacttaagtttgtcatcttattttttgttttctatttgttttctctgcttttaacttttctgctttcttttttacaccttcctatgggatatttgaacattagttataattccattttgatgtttctgtagagcttttgagtatacctttttatataactttttagtggttgctctaagtattacattttatatacagaattgtcactgtctactggtgtcataaaattaccagttcaagtgaaatatagaaaatcacctccttttatgtccttttaccccactctatttataattgttttaaatgttttctatatatacatttagaatggcaccatataatattattttttgtgaaatacaacttttaaaaaaacttaggagaaagaaagttagtagtatttatccatatttttgccaactgtgttctttcttcctgtttgatatttcaagtttccttcttttattgtcttctttctgtttagtgaattttttttttttaattttttttgagatggtgtctcgctctgtcacccaggctggagtgcggtggtgcggtcttggctccctgcaacctctgcctcccaggttcaagagattctcctacctcagcctcccaagtagctgggactacaggcacatgctaccacacctggctaatttttgtatttttagtagagacggggttttgccatgttggccaggctggtctcgaactcctgacctcaggtgatccacccacctcggcctcccaaagtgctgggattacaggcatgagccaccatgcccagccacagtgaattttaattagcttttcatatggg

SEQ ID NO: 95548 - DNA, 39243 bp, Homo sapiens
gtagtcaaggataatagtctcaaaacaattatgtaatcttcctcatttttcatttaaaaacttttgttttcctttatctccctgaatatgcacatagtttactatggcacgcaaattcccattgcgatgccctacgttcaaataaatacctttttcttttagagaacctctttctgttttttagtttgacaaagcacttctaaactctttggaatttgtgtcttctcaaacagggactatttctaaactattccttccccactatcactgtcttcccttttgtttctctatgtggtgcttgttactttttagttttaaaaaaaatgtgcggtgaaatatttaaaatatacagagagtcataaagaataatacaactctccatttgcccaacatccagcttaagttataaaacattgtcaacacagtgaaatccacagtatatccctcccctatgtcttcctctgctgccccttagaggaaatcatgttcctgaatttgtttattcccaggcacttcctgtaccattactagatgtgtatttagtcctaggcaatacgttatgtcattctgcatatttttaagctttgcaaaaatggtattgtgctatgtgtattcttctgcaacttgtaatttttttcatttctattatgagatttatccctgttggaatagtagctctggttcattcatttttacttatgtatagtagtccactcaatgaaaataacacaatctatctattttcctacggttggacattaaggctttatccttttttcttcttttattttttttgccattcaaaccatgtctgttatatatgtctcatggagtgcagacacaataaccctctaggatatatacttagcagtggatcccaggatgtactctcttcaacttcattagatactgccaaattactttccaaagtgtgtccaccagcaagtgtttatgcatttcagctgttctacatccacaccaacacttgatattgacaggtttttaattttttaatttctgtcaatctcaagagcataaaagaaaactcatttctatattaaattgcatttacctatttaccagaaaattggagcaatttttttttcttttactttttttgagacagagtctcactctgtcacccaggctggagtgcagtggcgtgatctcagctcactgcaacctctgcctcccgggttcaagtgattctcctgcctcagcctcctaagtagttgggattacaggcacatgccaccacacctggttaatttttgtatttttagtagagacggggtttcaccatgttggtcaggctggtctcaaactcctgacctcgtgatcctcctgcctcagcctcccaaactgctgggattacaggcgtgagcccccactcccggactctctctctttctttctttctttctttctttctttctttccttctttctttctttcttcctttctttctttctctctctctttcttccttccttccttccctccctccctccctccctccttccttccttccttcctctttctttctttcctcccttcctttcctttctttcctcccttcctttcctttctttcctcccttcctttcctttctttcctttttttgagacagggtctcattctgtcgcccaagtaacgtgatctcacctcactgcaacctccacctcccaggttcaagtgattctcctaccttagcctcctaagtagctgggattacaggcatgtgccaccacacctggctaatttttgtacttttagtagaggtggggtttcactacgtagggcagacttggagcaatttttcatatgaatatatgctatttctattctctcttttgtaaattgcctattcttctttttggccatttttttctatcgagttatgtgtctctttctcattgatttctaacagtttttacatattctggatactgaacctttgttggctatgtgtgttgcccatactttctcctggtctatggtttaactttttaccttttagggtgtgttttagctttcttttatacttcgtgcttttatatctcattaagaaacttctttctttctttctttctttttttttggagatggagtcttgctctgtcacccaggctggagtgcagtggcacgatctcggctcactgcaacccctgcctcccaggttcaaacaattctcctgcctcagcctcccgagtagctgggactacaagcacacgccaccacgcctggctaattttttgaattttagcagagacgaggtttcactgtgttgcccaggctggtctcaaactcctgaactcaggcaatccacctgtctcagccttccaaagtgctagtgagccaccgcgcccagccttcattaagaaatttctaccatgaattcacaaaggcattttctaatattttattcttcaaggttttaagttttgccttttcacatttatgtctataatcctcttggacttacgttttcctttatggtatgaaatagagatctttttttatcacatacataatcaattgtccttaccccattcattgaaaaaataatcttttccccactagcagtaagataacacataccaaatttatatatatatacacacacacagagacacaaacatggtatgtgtgtatattggttgcctattaatgcacaacaacttattccaaaacttagcagctgaaaacaataaacatttattatctcacagtttctgtggtttaagaatctgggaatggtccagctaggtagttctggatcagggtctctcacaagacagtgactaagaggttggccaaagcagcagtcattttgaagctctactgaaaaaggacccacttgcaattttactgtgtagctgatggcaggtgtctggccttcactggctgttgaccagagacattggttccttgccacatgcatctctccttagagttgctcacaacgtgacaacttgcttaccctccaagtgagagatcaaagaaagtgacagagctcccaagataagaatcacaacatttcattctctaatctcagaaatgacatgaagtgacactttatcatgtctatcatgctctttgtatcagaagtgagccaccaaatccagcccatactcaaggttagggaagcagacaagactgtgaagacccggaggtggggatcattggggttatcttagagtggtctactacagtttccatttgttgatctatgccagcctccctaccatactgtcttttttttttttttcatcctgtcttaattactgtagcttgtacaaagtcttgttatccggtagagaatgttcccctacttaattattattcagtatatctttcctatttggggccctaaaaatagaatgtagaatctgcttgttcattttaattgaaaacccctgggccaggcacagtggttcatacctgtaatcacactttggggaggccaaagtgcgaggatcacttgagctcaggagttcaagaccagcctgggcaacatagtgagatgctgtctctacaaaaactaaaataaaataaattatctggttttggtggtgcatgcctatagtcttagctatttgtgaggctgaggtgggtgggtgggtggattgctggagcctgagaggttgaggctgcagtgagctgagacagcaccactgcactccacactgggcaacagagtgagaccctatcttgaaagaaagaaagaagaaagaaaagaaagaaagaagaaagaaagaaagaaataaagaaagaaacaaataaagaaagaagaaagaaagaaagaaagaaagaaagaaagaaagaaagaaagaaagaaagaaagaaagaaagaaaggactctgttgggatttttattggaatttcattacatgaacagattaattagtaaatgaattgatattttatgatattgagtcttcctattcatttacatgctttatatctcacatagtctgagaagctcaccagaaagattagtgcaaaagggctgggaacagtggctcatgcctgtaatcccagcactttgggaggccgaggtgggcggatcacctgaggtcaggagtttgagaccagcctggccaacatggtgaaaccgtgtctctactaaaaatacaaaaattagccagcatggtggcaggtgcctgtaatcccagctacttgggaggctcaggcaggagaatcgcttgaacccaggaggtggaggttgcagtgagccaagatcacaccactgcattccagcctgggcgacagaggaagactccatctaaaaaagaaaattaatgcaaaagaagacaatttgggggtcttttcaataattcagtggtaacacacagtatatggagagtttgtgtattgctccaattcccgagtttaaaaggtttaaggtctagttccatatagaagtcctgcagttctaatagactgtgttttgatgaaatatcctcagtaagttagtatgaggtatgcacaacatttctgctgaaatccttatcctgcctatcattttgcagtggacatccatggttcagtttgcctggcaatcctcccttctcataagaacatcatcgctcttcttttagggaactaacagatcctccccaaactccaatcaggtggtcctaatccaggttgccaatcgcagtgcttcaatcacaggagtaagcacaggtcctaggccaggccaatcacagctccttcttggattttccaatttgataaaatccaggctggctggataaaatccagagggagagtttactcccactcctagtgagagaacagctgccaaatttctagtcttatggagctggtgtctgacaaactgaagctgagatgcagaaaaaagctgagatgagagacggggacatcttggtggtggccaggtggctagtgccatatacatccctgcccaacctcattttggttaggtgagcaccagtcattcccatttattcttttaacaacaggaagtatttaatgagcatctactattatgagccaatcattgaagacacagtgatgactaagccttccagtgaacacaaaatatatattaatgtaaaaagtactgcaagttatggacatttggaacctaagtaggcaaaccatgacttaaatctcatttaggctgggcacagtggctacacctgtaatcccagcactttgggaggctgaggcgggagggtcacttcagcccaggagttgagaccagcctgggcaacatggtgaaacccccatctcaaaaaaatacaaaaattaactggtcttggttttgcagcctgtagtctcagctaatcgggaggctgaggccagaggacagctagagccccggaagtcgaggcagcagtgactgcagtaagctgagagcacaccactgcactccagcctgggcgacagagcgagacactgttaaaaaaattaaaaaaaaaaaaaaaagaaagaaagaaagaaaagaaaaaagaaaaaggaaaagaaaacttatttaattctcaacaaatcctgttaggaagctcagagagggtcagtaattattgcaagtttctagcgctaatatatagcggaaccaagacttgaacataggttttcgactcaacaattgttttaattactctgcgctgcgtaaactgagaaacctctgaatccttacaattttaaaagaacaacttacagttttcagtttccatcagattccaattttctaccaaattgcagccctgaggtatgaatggttaccaaactttagttaaacaaacaaaattagctcattaagtaacagagaaaccactctgcccagcctgcattttttttttttttttgtatgagtttgcctcctttatgcgcaaggctccttgggagttgtagtctgaggcatagtcctgtgggtggaggcgctgactcactgggacccaatcagcagagagtcaacttgctctccgcgcagcgattggctggaagtcagcggtctcccgcccgcggcgccatcgcgccattcctagttaaggcggcacagggccgagkcgtagtgtgggtgactcctccgttccttgggtcccgtcgtctgtgatactgcagygcagccatggcagaaccgcagcccccgtccggcggcctcacggacgaggccgccctcagttgctgctccgacgcggaccccagtaccaaggtgggcacaggaccgaagggaacggctcccccagctcckctgggccgggaccgggccgcattctatccaaccccatcccgccgccgctgcaggtccgccggcctcgggcggacgggagtgtgatgggaagagggataatggtgtttgatggggcgatcgtggggcccgcgaagtgtggaggggatctgttgcctcagctagtttcaaagactgcgaccctgttttgaattggcttgtttatgttgcgacggtggctggaagccaggccaacccagggtcagctttcccaaatcagtcgccaaggcccacgagaacagtagtttcagaactcccagaaataggttcaaagatgcctgtcctgtaccagtcctgcccagcctcgtttttccttaccaccctgactgcagtcttaactcctgcaaactaatttgatcgctctaagtttaaccgcgcccagaatttcacttttgcttgcttggcctttgctgtgggtcacaacagcccttcttgccttcctcatcttcgtggggcccaggagagattacagaatcatagagtttggatctgaaaggaatcttagaaattccttctcttaccctctcgttttacagtaatgacccagtaagagaaatgacctgttgcatacaaaggctttcacttaccgaacatgtctttactgrgtaagaatcagtgtaactcactcaggtgtggtgtttcggttgccttgttaagatcagacacagttggcgggcgcggtggctcacgcctgtaatcccagcactttgggaggccaaggcgggcggatcacgaggtcaagagrtagagaccatcctaacacggtgaaaccccgtctctactaaaaatacaaaaaaatgagctgggcgtggtggcgggtgcctgtagtcccagctactcgggaggctgaggcaggagaatggcatgaacccsggaggcrgagcttgcagtgagctgagatcgtgccactgcmctccagcctgggcgacagagtgagactctgtctaaaaaaaaaaaaaaaaaaaaattcaggcacagtaaccgctgtttattccagtgaagtcatcagtgtctgtaaacacctttgtatttatttatttgactacatcatttgtaaattccttgaagattgaatatgtgcttcgtgcagacctttaaaaggggtagataagtggtccatgactctggtccctgcttgttctttaccttcagggcaaagagtcagacacatctcattgctaaaacttttgactagcacctggtacttggcttaggaaaaatgttagtcattgcaaaattaagggggaaggtaaaaaaattccgtcatgcccatctcacttgtatatcccttaatattaatacctggttttttcatataatgtaaattgagtcactcagtgtaaagtattttcccagataactaggggttttatgtaatggggttttcaaataaaaaggattccagggatatctttataaaatatactaagtaaatgtccttgcagcttaatttacattccacagtatctaaatttctcttgatgattcggagtaattaattttgagatcagtaatttttggccatgatggagacataaaatggaatacataataatagctggtatatattgagtgtgccaggccctggcttggtattttaagtacattgtttaatttaatcctaacaacaaccctatgaagaaggcataattatgatcttcattttacaaataaggacactcaggcacatagaggtgttgagtgatttgcccagggaggaccccacacttccaacctccaccctgttctgcttctggggtgctgactccagcagtaattttggaatttgccataaaggaaaataaaaaacctcaatgaasgctgggtgcagtggctcatgcctgtaatcccagcactttgggagagcgaggtgggcagatcacctgaggttagcagttcgagaccagcctggccaacatggcaaaactctgctctactaaaaatacaaaaattagctgggcatggtggcgggcacctgtaatcccagctacttgggaggctgaggcaggaaaatcacttgaacccatgaggtggaggttgcagggagccgagatcatgccactgcattccagcttgggtgacagagtgagactttgtccaaaaaaaaaaaaaaaaaccctcaatgaattaaattcagtttgatcacttgatacatttatgctatatgtaaagaagatggtaagtactttggggatactgggataaacaagatgaggttccctcccttcaccaacttatatcaactctaatatacaatggacctggggttagtgtgctattgaaatataaatcaccctgagagcaccctgggaggtagaggtttttaaaggtagcattagtggaatggggtatgcacagggtatttggagcctgaagacctgcatttgaatccccacttctgttgttggctgcagtgaccttgccagggcacttgggctcagtttgtagaaggagcataaagatatctcagagagctgctatgaggataaaatgacatgtattatgttctctaaactatgaagagtgatacaattcaaggttgtatttcagctktggggatcagggcacacatcaaaaagatggtggtgatgggcctatgccttgatagattgggtaggattccagcagagtacatgggaaggcattctgatgaaggaaacatcttagcaaaaatgtgttttgatacggggggarcccaccccaatatttcaacgtaggttctttctattttccataagtattggccagctgagaaataaagagtacaaagagaggaattttacagctgggctgccggggggtgacatcacatatcagtaggacygtgatgcccacctgagtcttagaccagcaagtttttattaagggtttcaaaaggggagggggtgtaagaacagggagtaggtacaaagatcacatgcttcaaagggcaaaaagcagaactactaataagggtctaacaaagatcacaaggcaaagggcaaaagcagaactactgataagggtccaacaaagatcacaaggcaaagggcaaaagcagaactactgataagggtctatgttcagcagtgcacgtattgtcttgataaacatcttaaacaacagaaaasagggttcgagagyagagaagcggtctgaccacaaatttactagggtgaagttttttccccaccctagtaagcctgagggtactgcaggagacgagggcgtatctcagtccttatctcaacctcataagacagacattcccagagcgggcgtttatagacctccccccaggaatgcgttcctttcccagggtattaatattaatattccttgctaggaaaataatttagcaatatctctcctacttgcacgtccgtttataggctctctgcaagaagaaaaatatggctctttttgtccgacccctcaggcagtcagaccttatggttgtcttcccttgttccctaaaatcgctgtttttctgttgtttttcaaggtgcgccgatttcatattgttcaaacacagttttacaatcaatttgtacagttaacacaattatckcagyggtcctgaggtgatgtacatcctcagcttacgaagataacaggattaagagattaaagacaggcataagaaattataaaagtattatttgggaactgataaatgtccatattaaaatgaaatcttcacaatttatgttcctctgccacagctccagctggtccctccattcggggtccctgacttcccacaacagttttaggatggtagaattgcaatgcagggcaggtactggagagttagttaaatgttattggttgcagttcaggttatctaagcagtggtggaagaggctaacatggtaggttggggccagattgtggagacagctttgagtgtcacatctaaggaagttagattttatatacatagtggggaatgagtcagggttttgaagtattctataaagtagattggagggatccaagtctggaggtgattaggccacttaaaaagctcttccagaaggtgagataagtgatatgagggtctcgtttgtaaagaagacagcagcaatggcacaaagtcgacttgttttttgatcatttgcatcttcattataaaggaagtccagagaatgtatggctatgtcacattttgggcaatctctctgggctaactttctttaaaaggtcagattctcctggcaacagagagagactccgtctcaaaaaaaaaaaaaaaaaaaaggtcaggttctccttccaagtagtgatctggagatcttttcttttttactatctgtatctgtctccactaatacagtagacaatgtcctcagtgttgccattatttctaccaccactgccaatgtccattttcacatcgttccatatataaatatatgaatatataaaaatataaaaaattaatatatattaatatataaatatatctataaatatatgaatatatatatatatgatggggtccctctccaatcaggtagattggtggaattgaatgcagtagaaaggagaatagggaatggaaaggaggaaggaagaaggacaatggccagataaatggctgactattcaaggcatagagaatcataatatatataaaggcataatgacatcagagaactgaggcagggacctacgggtaacacagtgaatgaagttataagcagtgggacttgagggaagggtgaccaaaacaatcattagggtactcaaagaaaagatgagaattcccattatattcatttgtttttctcaccctgtaatggttgctatttaagtgataagggtatgaaatagaaaatgtttgagatgaccggtttaggggagtggtgataaccgttggtgttagagaagtatgcagctacatatgtggttgcttttgggactgtctctcaaatgtgttgaggaaccactgaagtattgatttttaagccaaaaatgacatgacagggttttctttatggaaagatcactccaaattgcatgtagataagcctatgaaaagcaaagagataattgtctaggcaggaagtagtgaggacttcttgctttcctcaagatacactgaaggcagttgaaaagctcatttttaaaagtctggtgaaaaccactttgttcacttttgttttgtgggagatgtgacacctagtaataaagagttaacaaaccctttccccttttatgaaaatttgacttttcgttaactccctagtttcccagaaaacaatgaaaaattgtgtttgttgcttatggtaaaaataacccaattggtaaattgcatctggagagggagaattgtaaatacttgaaaggaagccatagctttggacttccctgattgtagtgactcttataactgtcccttgtggaaattctagaagttctgcctatggagttgctactagagatactggctcctgtggtacatggggccttctgccctagggtgattctcattcatatccagtgtgaatcttctccctgtacctgatctgtgtcgactcctgtaaggactcccactgaagaggaacacctgatacttctttgttggcaatctgtgttttcctaacagataccgttttgagtaaactggcaccatgtatggcctatggctatggttgtcttataagtctggatgtttagttgagccttaagaagactttctgggccaggcccggtggctcacgtctgtaatcccagcactttgggagaccaaggtgggtggatcatgaggtcaggagttcgagaccagcctaaccaacatggtgaaaccctgtgtctactaaaaatacaaaaaaattagccagacatggtggcgcgtgcctgtaatcccagctactcagggggctgaggcaggagaatagcctgggaggcagaggttgcagtgagccgagatcgtgccattgcactccagcctgggcaacagagtgagactccatctcaaaaaaaaaaaaaaaagaagaaggctttctgttgggggcaatataacacttttgaaagttatttgagagacaaagtagatagtctctaaagggaattggtctcagtcttattaaggtcgaaagacaacattttttaaaccagagaaattttttaatttctgaaaatatggctaatgcaagtgtggaacttctcctttctgcagactgagggtaataaaggtgctatggtctgaatgtttgtgtcccctcaaaattcatgtgttgaaatcctaatccctgaggcaggtattaggaggtggggcctttcagaaagtgattaggtaggtcatgaggacaaagtcttcatgattaggattagcatcctataaaagagactgtaaagaatgatcaagcccttctgccatgtgaggtcacagtgcaaaggtaccatctatgaggacagacactaaatctccaagtgccttgatcttggacttcctagcctccaaacctgtgagaaataaatgtctgttgtttataagccacccagtttatggaatttttgttacagcagcctaaatggactaagataagaggcaatggagattttaactttaagatgtaacctcttacaaagctctctagtaatacttctagagaaataagtatcttcatcactagaagcaaatttgagattttgtagggagaaaacacaaagtcaaacaacgttttwatcattgttgtagctttttgaccagttttgattcatcctgaaaatagacatattgtaaccaaatacactcatatcccattgtgggaggcagttgtataaaattcatttagagactctgcttctgacaagatgaagtagacatacttttccttattcctcctgctaagtacaactaaaaactctggacatgatatataagacaaacattggaagactctgaaaggtggtgagaagaaggtagactggctagggaccttgagaccctaggaacaacaaggcaatgagtttcctaagttttctttttgcctcatattgcccagacttgaagctgaagaagctagtaacctggaaatgctgatggacacagaccaaaaaaaagcctaatgaaagcctgctctctagccacaggacctggaaatgggcagcatttcctggcaagaaagaaaacttttagacaataactgctctactccaactaaactccatagagaaaactgtggcctcagtcccacccatgccagcaaaagctgagtggggagcctagattttcacccaascagatgtaatgagctgcccagccttcccctgccaaggtgatgtgggggaaggctgggtagggagccaggactttcatcctgccaggctttcccctcttgccatatcaatggagacacatgaggaacctaaaattccaccccaacccagcagtggaaatatttaagataattataagcgggagaaggtacaggaatgtaaagagaggtgaggtttctgtaccttgttcaaactaataaaatgatgtcaccaaatgactgataagttatgtgtgtgtgtgtatacatatacatgggtatatgtatatacatatatacatgtatgtctgtatatatgtgtatgcgtatatgtatatatatgccatatgtatatacatatatagtaacacctagagccaccatttaaaaagctatacaaagagatacatgcaaaaacactacagataaatgaaaattgaattttaaaaagttccagtgacccagagaaaggcaaaaagaagacagaaaacattaaaaaaggaagaacaaacagaaaacaaacatgaataaaatggccaacttaagccctaacatttcagtacttacattagatacaaatacattaagagacaatgattgatagaatggattaaaaaacatgccccagctgtatgctgtctacatgaaactcacttccaatatgatagagacaaggtaaaagtaaaagggtagaaaagataattcatgcagatattcatcaaaagaaagcaggagtggctatcttgatatcagataaagtagactttggggcaaagaaaattaccagacataagaagtacattatacagtgataaaagagttgtgattgaccaagatgacacagtaatcataaatatatgttactaaacagcagagctagggaacacatgaagcaaaactgatataactgaaaggagaaatagaaaaatctaaaattatagttggagacctcaacactrctctttttttttttgagatagggtgtcactcctgtcacccaggctggagtgcagtggtgccgtctcagctcactacaatctctgcttcccgggttcaagggctcctcctacctcagcctcccaaggagctggggctacatgtgtacactaccacacccagctaatttttctattttttgtagaaatggggtctcactatcttgcctaggctggtcttgaactctggggctcaagcaatccagccacctyggcctcccaaagtgctgggattacaagcatgagccaccaagcccagccaacgctcctctttcaacaattgatagaactagacagaaaattaacaaggaaacagaagaactcagcaataccatcaacaaataagatctaattagtatttatagaatgttctaccgaacaacaacagaattcccctttttttttccaagtgtctgtagaaaatataccaaagtagaccatgccctgggtcctaaagccaacttcagcaaatttaaaagaatggaatgatgtattcttcagcaacagtggaattaaactagaaatcagtagcagaaacataataagaacatcttcaagcactgggaaaataaacagcacacttctaaataaataatccatggattacaaaggaagtcttgggaactttttaaaaatattttgagctgaggccgggtgcagtggctcacgcctgtaatcccagtactttgggaggctgaggcaggcggatcacgaggtcaggagatcgagaccatcctggctaacatggtgaaaccccgtctctactaaaaacacaaaaaattagccaggcgtggtggcgggcacctgtagtcccagctactcgggaggctgaagcaggagaatggcgtgaacccgggaggcggagcttgcagtgagccgagatcgctccactgcactccagcctgggtgacagagctagactctgtctcaaaacaaaacaaaacaaaacaaatatatatatatatatatatakatatatagagagagagagagagagagagagagagctgaatgaaaatgaaaaagggatcatagctaaacagtgcaaagggggaaatgtatagcactgactgcatacattataaaagaggaaaagtctcaaattaataacgtaagcttcctcctaagaaactagaaaatgaaaagcaaagtaaacccaaaggaagcagaaggaaggaattagagaagcagaaattaatgaaattaagaacagaaaatcagtaaaacagagctggttctttgaaaagaccagtagaatagacaaacctgtagcaagactgacaatgaaaacaaagaagcacaaactaccaatatcaggaatgaaataggggatacactacagacctttctgacataagaaagataagggaatactaaaaacaactttgtatacataaatttgacaacttgaattggaccaattcctcatccaatatgaactaatatgatgagtcctataacttaaggcarttgaatttatgattaacaaacttccaaagaagatttgtccagacccaggtgatttcactggagaattctgccaaatgtaaaagaagaattaacatcaattatacacaaccccttccagaaaactgaagacgggagaacacttcccaattcatttgataaagctaatattaccctgataccaaaaacaaatgaagayagtacaagaaaactacagaccaatatctccaatgaatataaatgtaaaaacccttgacaaaatgttagtaaacagaattcaacagtatatatagaaagaattatacaccttaaccaagtgaggtttatatctaggatgcaagcctggttcagtatacaaaaatcagtcagtataatccaccatattaagagggtaaagaagaatcacatgatcatatcagttggtacagaaaaggcatttracaaaattcaacactcattcattattttttttaagttcagaaaaaaataggaatgggggcatttctttaacttgataaagagcttctcttgaaaagttagagctaatattacactcagtggtgatgctttctccctaattttggtaataagacaaggatgtctgctgttaccactcttatttgacaaagtgctgaaagttctagacagtgcagtaaagcaagaaaaggaaataagagacatataggttggaaaggaagaaatcaaactgtccttatttgaagatgacatgattgtctacatagggaataataagtaatttacagaaaactcccagaattcrtaaatgagttcagcaaggttgcagggtacaaaataaacatacagaaatcaatcgcgtttctatatactagcaaagaacacacaggcaccaaaaattaaaaaatacattaccatttacaattgcccaataaaatgaaatacttagatataaatctaataaacatttacaggacacataygctgaaaacagcaatggcgatgcaaaaagtcatagatytaaataaatggagagatttattgtgttcatgattggaagactcagcacagtaaggatatcaattmtccccaaatcaatatacatgtttaacacactccttatcaaacttttttagacagagacagggttattctagattgaaaggcaaaaaaactagaataacaaaccattttggaaaagaataaagtgggaagaatttttctacctgattttaagacttacatagctacagtaatcactactctgtggtattggcagagagatagaacattgaaacaaaatagagaaccccaaaatatacccacactagtatgcccaacagctttttgacaaagatgaaaaagcagttcaccagagggaggatagcctcaacaaatggtgctgaagcaattggacatccttaggttaaaaatgaagctctactcaattctcatcccttataccaaaaaaaaaaaaatccatttactggtgcttaaaggggccttaatcctttggttcacatccttgcctcacttttacagttttgtaaggattgtattgtaggcaggtaggacatgcactagaaacatccttgattgtacctttaaagttttcttggcggttgcggtggctcacacctgtaatcccagcactttgggaggtcaaggcgggtggaccacaagttcaggagtttgagatcagcctggccaatgtggtgaaaccctttctctactaaaaatataaaaattagctgggcgtggtggctggtgcctgtagtcccagctactcaggaggctgaggcaggagaatcgcttgaagctcgggaggcggagcttgcagtgagccaagattgcgccactgcactccagcctgggtgacagagcgagactccatcttaaaaaaaaaaaaagttttcttacagtagttttcttaattaaatttggagaatgacacttcccctccccccgaaaaaaaccttattatttctattgtccaccttttgataaggcacaggagcaaatctttgtcacccagtagccatccctgtaaaaccaaagatagtttaggcataaaagacaccttatttttattgttctaaatttaaagcatgataarggaaagacaaaattaaggactatcaggtgagacaagacatgagcatagcataagtcttactttttaaaacaggagatacatgtattttaaacgatattttagaaccataccaataaagcaataatttttaggaacttaactttttaaaacaggaactttttctcaagatcatgcaagtgttcacaagaggcacatggagttaacagactattttggtgataaaaataaaactgttatctgagcatagaataacttgatcattttcttaaaaataagcccttcttgtttttatatccatttaacaatttgtagcaaaggatttataagcctctattttatcaataaattcactaacrttgaatatatcttactttttttgccacgtatagactttttaaagtgaattttaatattctttatgtgtatgtgtttaggcagatacagtacatagttctcttaataataaagttaaagtctgtaacattaattttaagatataattaatctcaatagcatattaagtggtatttgttttcatatgcatgtgtgtgtgtatatatatataatgtttttaaaagctaatataccattttatatattcccatgccattagacttagtataccatctgtatatatctccatgccatttaatatacctcgacgcagcattttaaatgtttttcataatattcttttatgcctgtgtcatactatctaactattcctttgttagaggcagttagtggtttaaaagcaaggactttggaatcagattgcttgggccagaattttttctctgccacttactttctcagcagtaaaatggggatgataataatatgtatctcatgggcttgttgtgaagattacatgtattagtttctttgaatctcttagaacagcatctggcacatagttattgtgtaagtgttgtgatggatgcctttgtacataaatctttgtcagagtaattatttccttagaattttagaaagagaacatcttggtcaaagaatatgaattcttaggccaaggcaggcggatcacgaggtcaagagatcgagaccatcctggccaacatggtgaaactctgtctctactaaaaatacaaaaattagccgggctgggtggcgggcgcctgtagtcccagctactcgggaggctgaggcaggagaatcgcttgaacccgggaggcgggttgcagtgagccaagatctcactgctgcactctagcctggaaacagagggagactctatctcaaaaaaaaagaaaagaatattaattcgtgcaccaccactactggctgattttttgtatttttagtagagacggggtttcaccatgttgatcagtctgtttctcgagctcctgacctcgtgatccgcccgtctcagccccccaaagtgctgggattacargcgtgagccactgcacctggccaagaatatgaattcttgaggactcttgatattccagttgttttccagaaagattgtaagataaggatatgatagactatgggatagaatagttaaggttgtctaactttggcaagtacttggcatggcatctacaacaaaaaatacatgctgtgcctaagatatatggatttgagtatagcctgtatagtgtgaacagaagtaatgataaagtcgttggtaaagtaccaatactaatgttggtactagaaagatgttgaagaaacaaaacataaacagggtcactacaaagcagattttaaaagatagtttttagattttatccttttttaaaaaaactgagcaacaaataatgttgggtgcagcttggttggaaatatattatctcataattccataggctagaggtccgacttrggtctgtcccactgtattgacaggactgtgttccttactcagaggctctggggaagaatctgcatctaaatccatttagattgttccctgaattcagtttctttccactgtcggacaggggtcccagcttccttgctggctgtcaggcgtggatgggtatggtggggtgggagcagagggcagctgcctttaactcctggcacatgtgccccatgtctcagagccagcacctgcaggttggccccttctcacacttggaatctgtcccacttccctttatgccacactcctcttctactttctttgcgcgcgcacgctcgctctctctctctcctgcttttaaggtcttgtgtgattacattgaatccacctcagtaatccaggctaatcccattttaaagtccactgatgagtgaccttaatttcctctcagagtctctcacagcagcacctaggttagtgtttgagagaataaggaaggacatctttagaatttagtccttgcttgcacctccctccagggactgcagtgctccctcctragactgagaaccagtgctgggaggacagatctcccccatgaggcctgccagctaaagtctgtgtgattgtgtgtggtcgggcctgacagatcatacataagactttgtcctgcaggtggcttcctcaagcaaacattgtaatcaatagagaagcagctaccactcatattagctgggaaagaaggatgtttgttattttggtagtgttcatagtgccttgttttaatgtatacttagaccggaatatgaagtggacatggtcttgctgctttaaattttttttttttattttggtatcacatcatggcagccacagagtgactttatatatgttcaacaggagaaaaccaaggcccagctgtgagtaccaggccagcacttggatgtgcagagctacttttctctttctcagctgcttgataaaatcgagacctttaggactgtagcatctgactgagaaaagcaacccaaatgttctagaaacatgtaacctgcctggcatgtgattataagctgcgaataaagaatttaattattatatttattaagatcagttttaataagataaagtagtttttaggctagttttgttttaaatgagaattttaatgcctaaaagagtatgtttcatttacttaaaatttagcaaaagagaaaaatataatttcctaatgaggctgaatgaactatatttgtattttatatgatgtgagttatataggagaaagatggcatgtggctccaaagtaagtggtcagaattttcaggcctgttttgtcaagccatgggtttaacagaaaaaaaaaaaaaatctgttaggaagcaccagtgaggttcacagacttatggtctggaaggtacataccaatggtaaagggagaccaaaacttagaggccttaaacagttaattactcagtgtcagcttctcatctacaacatggggtatgaatatcgacagtaataccatatagagttattacacctagttaagtcctaagtagaattattaatgctattaataatcttaactccatgaatttacataccttctacccttttctcagtcaagccttctgtttcctgataagtaagttgaatttcccaaaggtgttagcaacagtaactttttacccttttagttatttaggagtctaggatcttgtgagtaactctttgctaatttgcgtggtcaccagtaaatggttctagaagggcatttatgccttcattcaacaaatattgtagtgatcaacctctttatgtgtaaaatcagtgtcttagtttgggtagccccaaagcagactagagagaatggtgtggttttaagtttttgagaagtggtcacagagagctctgcagagttagggagagagggtgatcataggtgtatacgagtggattaccactgtgggcaactgaggttcaatcctgctggggattctttgagggactttgtggtacctgcctctgaattgtcccaccaagggacagggatgccaggttttttatcgaccattggttgaaggtcattcctgcagtggaaactttctgacactttggacttgcatcacacaggggcctgcaaccagaagataccactgagcagagagcccttgcaagttgtaggtggtaggttaacaattgtgtttgtatcttgttacagaaagcacaattaatgttggtaataaatggtaaaagtgaaagatgtttaatataaatatttttccataggattttytattgcagcagaccatgctacgagtgaaggatcctaagaagtcactggatttttatactagagttcttggaatgacgtaagtcaagtacttattggcaccttaatgtttaaatatatagctttgcaaatctakagagtgttttcagacccatcttaaagtttgtttcagaagtaacagaagttcttttggccaggagtctgtgattaggcctggctggacagggcttctctcgtaagttctttttcttctctatcycagccagcctgaaagggcaaaacaagacacaaatagttgcattttctccagtctgccttctctgagcgctcccagctaaatccttaatgtgttcagaccccttttgatgttctggccacttttagcctcttgtttacttcagaaaagttatagataataagaacttactactcagaaaaccaatgggtttacttaaaactgaccatctgttctatttttctaggctgtgttttcttttgctcaacaggtcatatccactgatcttgcaatcctaaagcatacttatttttctaaagcatgtttatttttctttttttctccagctttactgaggtatattgagaaataattttgtcatattgttgatttgtttccctaagttatgtgagcattttgcttttgagcatatagatacatgaataataaaataatctttaaatttagtgcctagataacttccattcacattgagagaaaaatttaagtaatatatgtctatatttagaaaatttgaccagttcagaaaaatacaaaatgaaaagtaatagcttccctccccaagttcttctccccagagataactgctgtccagtttcttgtgatttttttctagaaaaaggtattatgaatatatttatgacatatttaaaggacaaaatgaaaacagatttattgaacacttttgccaggcacttcaaatgttattttgttcagtcttcacaccagtcttaggaggtagcttttatccccatttcacagacggagaaaccaaagcttaatgagatgaagttactagctccaaatcccacagttggcatatggcagggctggaacctgtatccattgtctgatgggctctaatgtagacttcctgtgcagagcccccaaatagggtacaagttgacagtaagctggaagatttgaacagctgagaaaagcaagttgcaacagtttcatttccttcagtcccaactgattggtccatgagggttgtgtagtctgctttagtaggtgcagagattgtttttcatgattggagtatttgaggtgtttgatactttattataaacatgttagagtaaatcttatttgtgataagtcaatgcaaggatctaagtgggccaaggtctattatatagcagtgataatgaaataaaagattggaagcagaactctagaaactttccatttgctatatggcaataacagccatttgctcttattgattatgaacaaagtcatctttgaataatctaaagaaaatcatatatgcattctcakgccaccttactccttgccaaataatcctataccatttaaagtcatttaaggttcaggacttcagttatctttcttaaaacctcaggattcataattcattcactctctctcccatcagtctcttctactgtctctttcccctcagagaagcgtaagtcttctttgttccagaatatttcttgccctctgctccttcgcctacctccccattgtcactgccatgcttgctactgttttacctgctcacctgccattctctctccccagtacagtgtaatccagctgatgcttccccactctgctgacattgctctcatgggacctttccatatctcatgaccttttcttagtcttaatactgtttgacctttctacagtatctgatactgttagccaccttactgttgacattcacgtcttctgtgatactagtctgtccttcctccttctttcttaccacctatccttaatttcctttcctagatgttttggcatagtaagaactcaataaatgtgtttatttaactgaatgacatatttatatatgtgtttgtatgtgtgtatatatatgaaatagcaacaaggttctttatatttttcagtacaaataaacacagttctcttttggagatagccgtttctatttattaacaagtaccataatttcagctaaatgttactatatttacagaattgatgaattacagaagttttcatttttgtatttcaaatatttacagatgcatttttmatgatwttttttcactgatttttcctcctgcttattccattaaaataggcttactacatatagctcttctttttagtaaaacttgaatattaagttatgttgattatagtatgaattagcctttcctgttgttaatgattcaggcttgttgttttttcattgcaggctaatccaaaaatgtgattttcccattatgaagttttcactctacttcttggcttatgaggataaaaatgacatccctaaagaaaaagatgaaaaaatagcctgggcgctctccagaaaagctacacttgagctgacacagtgagtatgagtttctatatttatatatattatagattttttaaggtagtttttaaaaatcttttttgttttgtttactgaccagtataattcaaaccagatctgcctakgacttcacatttttaataatatattgaagtgtttttcatgcatcttttgayctttgtattgttcttggscaaatgagatgtgttttttttagagacaggctctctgaagcctctaacttctaggtagtcttcctgcctcagcctcctgagcaccttggactacacatgtgtgccaccacacccagctagtttttgtttgtttgtttttggtagaggcrtagaggcaaggtctcactatgttgcccaggctggtctcaaactcctggcctcaagtgatccgcccgcctcggcctcccagactgctgggattataagcatgagccaccacgcctggcccatttgtcttttatttttatttatttatttatttattttttgagacagagtcttgctctgttgcccaggctggagtgcagtggcgcgatctcggctcactgcaagctcygcctcccggattcactccattctcctgcctcagcctcccaagtagctgggactacaggcgcccgccactacgcccagctaattttttgtattttttgtagagacggggtttcaccatgttagccaggatggtctcgatctcctgacctcgtgatctgtctgcctcggccgcccaaagtgctgggattacaggcgtgacccaccacgcccggcctccatttgtcttttagataagagaatataagaccctgaaattgtaagatatttgcctgtttgtctctaactaatttttaggtactataattagtctttcagcatccaaaattttgttcttttattattttgctacattttggatccagaaatgtgatatcatgtgttcctttaaaaattcttcaaaccattttgtaataattaacattcaaatttggtatttttataacttgagcacttaaaaatgtaggcaatttctttacattgtttatctgcatactttaaaagagattgatttcagagtgtgtgatttcgtgtgtcccttgattcaaaataaagctttggaatcaggcaggsttagatatgagtctgwgactctaaacaagtaagtggcagtttcatcaawrgaatggagatgttcacacctagcccatggagctgttttaagggtttaaatgaaatataaagtacttagcacaataaatgagcattattattattcttattattgttcttgtccagtacctgtatttactgtctcyttagtctcgktaaaatcatactttggccatttgtcctttctatagttgaaaacttaatatttttgtagcaggggttaggccaattatgtaaagtagcatataaacgtggtaagatttcaaagatgttacttgytttkcagaatatctattccctaggacattgtagctatgttttccttccttttgtagcaattggggcactgaagatgatgmgacccagagttaccacaatggcaattcagaccctcgaggwttcggtaagtttgcctgtttttatgtgatatatgtagatttgtgtgattttgtattatgtatataattatgattttaataaacctaaaacattaatgtcctaattaagtatgatcaatttattagagatatgattatttttattttccacaaataatcttatttaggagttgtttaatttcagagtctcgatctaaaattacacttaccatctcaccatgatttacttttaagtctcagaattaatttccagtagacttttttttttaaaaaagctgtagttaatactaatcccagtttctgctagcacatacacttctgccttgatctccagtctctcaatcaagatgacagtattgcaggcttcagctggctgctatagtcaatgccaaccacaaacctrttaagtattagtaaatgattactgttttttggtgtcgattattcttaactgattagactgtatatgagctgatattgattaattttaaataatttataattcaaggcaactaattaactacttatacccagcccattagatctatatttgttctttaatgtattatagattttgaacctacctaagtctgttcccaagtgccttatgttttgaaataaacaagttttggaatctacttgtggtacttggacaccctgttataattatttcttccttctctctgcttttttcggggggtatcacgtaaggtcatattggaattgctgttcctgatgtatacagtgcttgtaaaaggtttgaagaactgggagtcaaatttgtgaagaaacctgatgatggtgagtctactacttactgtgttcaggcctgtctttagttgatatttactaaccacctacagaggccactgttgtagtaaaacccttttggctacaagtaacagaagtctccacttcaaccagagttttaaaaaagagaaatgattggaagaatatctgggtattttagggaactgaaagacagcaactagggtggctttccaaggcactagacacaggacctggacagccatcaaaaccctacgcttcctctcccactgcccgaccccaccactttctttcattggccaccagctttcactatttcagtgtatatctttccgcccaaaaataagttccttaaagtccattttatctgatgctcatataatgacaccagctctctttagtttataatcacatggtatttctttttcatcttttataacctttgtatgtccttaagttttaggtaggttttttgaaatagcctacgtatggattttgctgggtttacatgtattgttattattttacttagatctctttctgaactatttcaaattaaaattgaaatattaaatatttcagagtctcaatctaaacatttgaaatatttcactgtttaatttcaatccttttttaaaaaaattaaaatacttaatatccagtgctgggcgtggtggctcacacctgtcatcccaacactttgggaggccaaggcgggcggatcacgaggtcaggagatccagaccatctgggctaacatggtgaaaccctgtctctaccaaaaatagaaaaaattagccaggcatggtggtgggcgcctatagtccgcctactcaggaggctgaggcaggagaattgcttgaacctgggaggtggaggttgcagtgagccaagatcgcaccactgcactccagcctgggcgacagagtgagactccgtcacaaaaatatatatatatttaatatccaaatcttctccccaataagaaaggaatttgcttcactcygtcctcattgtgtcactattacctagagtgggatagtattgattttattttttaaagataataataaatatatcacggtgtttgatcactttttcttcatatatctcttgtagtgtctcctttgagacaggatctcactctcatccaggctggggtgctgcaatggcactgtcatagctcactatagccttgaaactcctgggctcaaacaatcctctgcctcagcctcctcctaagtagctaggaccacaggcacatgccaccacacccagctaattgttttatttttttgtagagatgagttcctgctatgttgcccaggtttgtctcaaactcctgagctcaagygattctttcaccttggcctcccaaagcactgggattacaggcgtgagccactatgcccagcctttttagcatcttttggatttttctgttcttttatttaaatacctcaaccaaaatggtctttaaaggggttttgtttttgttttttgagacggagtttcgctcttgttgcccaggttggagtgcaatggcacggtcttggctcaccgcaacctctgcctcctgggttcaagtgattctcttgcctcagcctcccgagtagctgggattacaggcatgcrccaccgtgcctggctaattttgtatttttagtagagacggggtttctccatgttggtcaggctggtctcaaaatcccaacctcaggtgatccgcctgcctcagcctcccaaagtgctgggattacagctatgagccaccgcacccagccctttaaagggtttttaaggcaaaacttttgagattctgtgtaactgaggatgatgcctttatgtctgaaggacagttttatggaaaagcctaggtttaatttccttcagtcttgaaaatactcttctattttctttttgcatatgatgttgctgttgaaaaatctgtcaattcatgttcctttgtatattcttctgttttattctrgaagctttttatattatttctttgtcactgcctgcattctgggagatttcctcaaactggaataccaattagctaattttctcccaaatgtatctgttctgatatttaattcatctattttgttcttaaacacctgttataattttgatctctaattttcgcttagtttgcttaatatgttcttgttctttttttcatattggtaatatttcatattgtttattacttttttttttttttgagacagagtcttgctctgttgcccaggctagagtgcagtggtgtgatcatagctcactgcaacctcaaactcctgggatcaaacaataatccacctcagcctcctgagtagctgggactacaggcaaatgccaccatgtatggctaattttttattttttgtagagacagggtcttactatgtatctcaggctggtctcaaactcctggsctcaagtgatccttctgcctcagcctcccaaagtattgggattacagatgtgaaccaccacacccggscggtcawtayttttacatgtctaaatagtccttgggtctgggcatggtggctcatgcctgtaattgcagcactttgggaggccgaggcagaggattgggaggttcgggaggatcacttgaggccagcagttcaaggctgcagtgagctatgattgtgccattgcattccagcctgggtgacataggaagaccttgtttctacaaaaaggtttttttttaaattatctgggcatggtggcacatgcctgtagtctgtatgcctagctactcgggaggctgaggtgggaggattgcttgggcccaggagttggaggctgcagtgagctatgatccactgtacttcatttcagtataaacgacagagcaagaccctgtctccagaaaaaaaacaaaaatagctcttggtccattattctaatatttcttctgtttgaatctacagtccattgctttgggggtgttttatggttatgtttctcaaattattakktttygcctctgagcttttttcccctrcaactgttcgctattctaacacatcaagcagtgtgaataggagaatggccagatccctgtccttaacaacccacatgatctcaggacaatgggctggataagcctaggccagagattcctaggcacctagaaatgagacttaaayttatttcaccttccacaaaacacctcttcaggttggatcttcccacttcatccctcagggaagagtattagtaggagacacttccgatagtgttattccctagccctgggcgtggagagagggctggggagatcattcggccctaccagtttttctcagtttctcacaagcacaaggctcctgcactgcccttgtttactggtaaggacatctgaacaagygagagggcaggtgccgatgcacacagcagtgagggaggarcaagagcaaaactctgttctctcgcagccattatgcactgccttctggtccaggccagaactaccacctcccacacagcccaagttaaaacagtcacccggccccatcctcacccattctccccagctgtcacyagccgggtttctttctttctttccttttcttttcttttcttttcttttccttttcttttccttccttccttccttcctctctctccctccctcctkccttccttctctctttctctctttytctttctctttctctttctctctttctttctyyttcctgcattttccatctatgttcctctaggattgatcttggagaaaggaggcagagataagagtcaaaccaattcaacataatggtccccaaataaatttctgaggtcatatttttccatttaagcaaacagctctgacatactagactctcaatctcagttttgaattcctgggagaaagactctcgcagagcttgggttgcyyaggatagtatttaaaagggtttgtatgacccaagcatctgggtcttttggttgtgggggtaagccatgctaccagctcccttcagcacctccctattttctttttcttctttaaaataagacaatttctgtaactactgaactggtagtgtggtatcatgaaggtgaggsaaatgcctgatacctaaaagatgcagccagtcccacagtttatttcaggagggctggtatttgcaatgtgtgcaagataacattttagtcattatgaaaagtatgacttttcatactttyctgacaataagaatttttaaaatttaaaactgtaaacaaaataatgtacttcattaaaatgcaaagtaaatctttaattaataaaagtttttaaggccaggtgcagtggtttgtgcttgtaatcccaccactttgggaggcaaggcaggaggattgcttgaggscaggagtttgatagcagcctgggcagtacattgagatcccgcctctacaaaatcaaaaaattagccaggcaaggtggtgcgtgcctgtcgccccagctacttggcaggctgagctcaggaggtcaagcctgccttgggccatgatcatcccatgcactccagcctgacattcagagcaagaccttgtctcaaagaaagaaaaacatttttatggtgttttcttttttagtcttttcaataatgaaaattttcattttacaggtaaaatgaaaggcctggcatttattcaagatcctgatggctactggattgaaattttgaatcctaacaaaatggcaaccttaatgtagtgctgtgagaattctcctttgagatttcagaagaaaggaaacaatgtgattcaagatatttacataccagaagcatctaggactgatggatcactgtcccrattcaaattattcttcagtccatttccccttcctatttcagctgttccttttcacctaactgttcagtcattctggttttcaagcagtgctttatctcatgtccttgaatatagttgtgtaactttattttttaggtaataattagaacagttcccttcagaggctgcatttgccttcttctgccacctaaatattacttcccttcaaatctgcctttgaatcatcatttttaaaaaaaaattaacatgtttttgttgtagttatcttctggggtttcaattcctcagaaacaacttttttcacaacggaaaggaaagaacactagtgttctttcagtaaagtacaaagtgtttattttacaaaagagtaggtactcttgagagcaattcaaatcatgctgacaaggatactgatagaaaaagtgatttcttcttattataaagtacatttaaagttcaaggactaaccttatttatttgggaaaggggaggaggaaggaaatgatatggtacccagacactgggctaggctgcaactttatctcatttaatactcccagctgtcatgtgagaaagaaagcaggctaggcatgtgaaatcactttcatggattattaatggatttaagagggcatcaatcagctcaactcaagatttcataatcatttttagtatttagattgtgcctcaaagttgtagtacctcacaatacctccactggtttcctgttgtaaaaaccttcagtgagtttgaccattgtgctcttggctcttgggctggagtaccgtggtgagggagtaaacactagaagtctttagtacaaaactgctctagggacacctggtgattcctacacaagtgatgtttatatttctcataaagagtcttccctatcccaaggtcttcatgatgccagtagccatatatgataaattatgttcagtgataacttagttatcagaaatcagctcagtggtcttccccgccatgattcacatttgatgagtttttaaaaatcaaagtgattttgaaaatctctaatggctcagaaaataaaaacatccagtttgtggatgactatatttagatttctctagactctagtggaagacctttggaaaggccatgccaaccgtgcttgtactgctagaagcactttatgtttcctttttgrgtgaaatggatttatgtgagtgctttaaacaaatagcaatacttatagactgaaataaaatgaaacttcaaataagactatgtttaatttgtaaacctttgtccatcatgttctttctttaaaaaaaaaaaaaaacaactccccttagtgagtactgaaaggatttgaaaaggcttgtaggctcattctgaagagagaacaattgtgattctgtacagcccgtaaagcaggtagtgtctatggataagggagtgtgggaaaggtgggaagaagaaagtgaatacggaataaaggattgtggtagataaagtgcaaacagaagaatatcaaaaggtaaggaacttatgaagaccaatttcacatgttgagtgctagaactgacaaacgggagggctaatacattcacaaattcagtaatttaagctttatttccaaggaaagaagccttctccacttgctgagtaaaacttgccaaaagatagcccttgctcattctttaaattcattcctatatgcattttttttaaatgtacagttggcccttgaacaacataggtttgaactccactggtttatttatacagggatttttttcaagcaaatgtgggttgaaaatacagtacaaagggggctgacttttcatatgccaactgtgggacttaagtatgcacagattttggtatccatgggcagtcctggaaccaatcctccacatacaccgagggacaactgtatatggtaacactacgccttgttagggaaaagaacaattcacttccaaattcacttacctgagaagttgtacgaaagtacaaagtaggtcacaagaagtaagttttcttattttccatgatcatggtcaatgtaaaacaagtcagtctcctatgagccctacatagctaaggctagaatgattataatacaggtggtttgaatgaagagcagatggctgaaagggaatcacttgaggctttcccacacagtattttgaccatgattgcatagagtgtgtcttagttgaggcaattttaataaaaataccatagaccgggtggcttaaacaacaaacatttatgtctcacagttctggaggctgggaagtcccaagatcaaggcaccagcagatccagtgtctggtgaggacccacttcctgacttgtagacaggcaccttctcactgtgttctcacacatccaagataaatcatctcttaaaagggcactaattccattcatgagggttctaccctcatgacattacctcccaaaggccccacctccgaataccatcacactgaaaattaggcttaaacatatgtatggaagggagccgcaggacacaaacattcagtccatagtacagtatatataaataatcctcagccatccaactgattatgaagagtgttagtaaggatgcttgctattggcaataagaaaaaaagccagcacttaagagattgtaaaatggattggttgaccaggcgcagtggctcacgcctgttatcccagcactttgggaggctgaggcaggtggatcacttgatgtcaggagtttgagaccagcctgaccagcaagatgaaaccctgtctctactgaaaatacaaaatttgccaggcatggtggtgggcacttgtaatcccagctgcttgggaggctgaggcaggataatcacttgaacctggggggtgagctgagatcacgccattgtactccagcctgggcaacaagagcgaaacttcgtctcaaaaataataataaaatgggttggtagagggttcagagataacaagaaccccagattatttccatctttcccatcctgtcatttttagcattttttctcactggaccaataatatgatcaaagatgcctaccatgattctaggtatcatgtgtagaccaacaatgttgataggatttggctgtgttcccacccaaatctcaccttgaattgaagttcccataatccccacatgtcattggaaggacccagtgggaggtaattgaatcatgggtgtggtttcccccatgctattctcgtgatagtgagttctcacgggatctgatggtttgataaggggcttcccctttctccttcctgccaccctgtgaagaatgatgtgtttgcttccccttccgccgtgattgtaagtttcctgaaaccttcccacccttgcagaactgtgagtcaattaaacctcattcctttataaattacccagtctcgggcatgtccttatagcagcatgagaacggactaatagaaatgtccagtgaaagaaaatatcattttattcctcatgtgtctttgataaggagtgaaaaacctttccctaagctcctcagcaaaattcccgtcatatctcaaccagtactgggtcacttacctgtctaatcactggccaagggggtgggaacactctgacttagatggatcgtatttacccaagctggctgcatgagggtggacagtgaatcagaattgagactgccagaatggaggagcaaataggggcttctgggtaggtgtaaacagaaaccgcacccagagtcaaattagatattgagaattagatattaggtgcagagtactgtaagaaatgaaacatttcttgccctcagagcttaggtctgagattgtggttctcaatcatattagacttagctgaccctgtttataataacattgtaacataatatctatcacatccactatcctgaaatgacattcacatgatataacctacttattggcacgacatgaagaaacatcagtcaatacctttatggtaatatgaaggagaaatataatcaggttgcaataaaattgtgcattttagtatgtcagtgcccacatagactagaagacaatggagtagtcaggtgcttgcccttacatatggaagaagaaaacatcagagtattgttgacactctttgatattttaaataaagactgaatttatgattcatgaagagctataattttacaaatttaaatacatattcataacaggtgcattttactgatgactcaaaaacatgatgttatgttggaaatatttcccaaaatggtgatcaattcttgctaaagtttcgaataaaagagtaacttttttgtttatagaatagttttttccctagcaaatattaaaattataaatgcaaataagtaagatacaagttgtaagttcagataataaaaagcaggctttaattcttttttaaaatttagaatagttttagatttgcagaaatgttgcaaagatagtgcagaattcacatacaccacatacctagtttcccctattttaaaaatcttacattagtgtgggacatttatcacaattaatgaaactatattgatattattaactgaagtccatacttattccaatttccttcatttttacctgctgtttccttacaggtgacattcaggaaaccacattccatttagtcaccatgtatccttaggctactccagactgtgacagtttttcagactttccttgtttttgatgactttgacagctttgaggagtactcactaggtattttgcaaaacgtttttcaattgggatcttctgattttttttgtcatgataaaactgggattattgttttttggaggaataccacagagacaaagtgctcttgtcacatcaaggggacatactatcaacatgacatgtccctgatcttactatgttaaccttaatcacctggcagtggtagtgatgaggaagaaactcattatgtaaagcccacactggctggggggagttatgctccatctccttgaggggaaaagtaggctttttacctatatgaatactcagtgggactttccaaagttatacaggtcattacaggatgtctaacatccctgctcaccatccactaaataccaatagtgaaacccaaccaaaaatgtcccacaagtctccgaagtaacccctaggggtcagtactgctctgttgagaaccactggtctaagatttccaattcaagtttccttagagtgtgaatttaaagcatttataaagaaatctgagtacagaattcctaattttatgctttcctccttatttacagatgcttttttcctgcctctaattcaggaatttattttaggtatttgcctttgagtgttcttcttttatataactttgttttacaaaaactcatattttacataaactcattttctttttacatgaactcatattttattgccttatataatatttaattaaattatatatttaaaattacaaggatgattggattgagcacattggcagtagacacaatcgacttgacaagtaactcatctgaggaagtagaaatgcacagagtggccaactggttatagttactcagcctgacagggcatcagttctttattgaggaaatggtgagtgcggttaatccaataacaggttaagtggaaattggttaagagaatttctactgtaaatgcatcgatttgagtcctatcaatattagcaaaggctgagtgcggtggctcatgcctgtaatcacaacagtttgggaggccaaggcgggtgggttgcttgagctcaaaagttcaagaccagcctgggaaacatagggaggtccccatctctagaaaacataatacaattagccgagtgtggtggtgtgcatctgtggtctgagctacttgggagctgaggtgggaggattgcttgagcccaggaggtcaaggctgcagtgagctatgattgccactgcactaccgtctgggtgacagagggagactctgtctctaaaaatatatatataagaaaatattacagaagattgtttaatgccagtacctaggattgctctagttgtaatgaaataggcacttttatagacttcatccaaaccacttcaattttacagtaagtttcacgagttattttataaagacttaaaatgttcacatcttatctggaaataatgtgatattctgggaattctgtatcctagaaaatattgtatccttgaaaatttattgcttgtatcacttttcataatagcaaaaaataaacaaatgtccaaaacttgggaaatcattaacttttatagtacccacaatgatagaatattatctattctactttaacaccactaaattgtgtctttaaagaatgcttaaagatgtagagaaatggttatgagatatccagtggaaaaagcaagtttatgtacattatgcttttgttagaaaagatacatgtacacatagaaatcactagaaggaaatataccaaattttgattattgctggctgctgggattaccaatgattttatttccttcattatatttttctgtattttccaaattctctaaaatgaacaagtgtcacttttataacacggaataattaagtgatattgcttaatttgctaacatttacatttttaccttttgagtaaaatgaggtattttaacaacatctctgctacccaaacttctattcaggatggtaacatattaaagattagaaggtactttttttttttattttttgagacagagtttcgctctgttgccaggctggagtgcagtggtgtgatctctgctcactgcaacctccaactcctgggttcaagtgactctcctgcctgggcctcccaagtagcagggactacaggtgtgcaccaccacgcccagttaatttttgtatttttagtagagacggggtttccccatgttggccaggctggtctcgaactcctgacctcaggtgatctgcccacctcagcctcccaaagtgctgggattacaggtgtgagccagcgcacctggccttagaagatacttttatatattaagttattcaaagctctgtatggttaaaatgacttataattccaaacgatcaagttccatttagtgacatgcaaaatttctttaatcatttaaggataatgtttagttgtgttcttttttttttttttttttttttttgagatggagtctcactctgtcgcccaggctggagtgcagtggcgcaacctcggctcactgcaagctccgcctcctgggttcacgccattcccctgtct

SEQ ID NO: 95549 - DNA, 25079 bp, Homo sapiens
ctcattctattgtatcctagttcatcctttcctcttctaaaccttcactcttcctcactttgccaatttctgcagaatggaaacatagagaggctaggtgagatggcagagtggtaggtgtatgtctagtggtcaaagattggtcagctgggctaggaacagggcagagtgtaggatgtatttattctgcacatctctggcccctcctacctacaggcaggtagagctgctgcgcaggagatgcctagaggcccctgaatgttgtcagtcctgggccagggctccaaagtctcttttcttttgtgaatggccactatctgctctgtcgcttggggctcccctgtaccccaagcccagtttcagagtcttcccagaggtcccctttcttgtagttccagaaaacaagcacacaatccttttgttttaaggattttactgctgattctcattagcagcttacaaggtactcagtccaaagcccaactttgctgagaactccctcagatctcgaccttcctcttgtatcctcaagtagagcccaaaaaaacatttacttgcctcccagactccttctccccccacccccaaatgttgaggacactccatacatttaggctcttcttctggtatggaagccaggggaagccatccctggtcacaccagggccttgatcatgttcatcagggcctcatttgtccctttcccaggtcgcccagcccacacagagattatccgctaagacaagtaccagaaaaatccccctagcgtccacttgcacctactctaacacatttctcattttaagggctgaaattcccctctcaagttgattgtagtttgtcacctcttcccagtaggttctttggccttgcaaacaccccttcaaagaggaatactattagtcaccttaatgtacatgatccttatcagatcactttctttaaagactgaaagtgccagccacgggagctgggcagtgccaggagtagccactggaatggaaaccatggtgaccaggactaaagtcaccattttacccagggtggtgtgtcccacatggcaaagcaagcattgtgtcctgtacagaagactgtaaactctgtcctgccctgtgattctggtgccttctccaatcccagcctcagactctgggagacccttggccccctcccctcttcattggccaaggctgctcaaagccctggacacctcrcgtttatatcaacagagcagttgctagaggaagcagcctcccgccctccagaggggtgtctggtgcccgagccctgttgtttgtgtaccttgtctcagtagtgaccagaggggcaggcaggcctgggctgtgtctctrgggcaacgtactgttggggtcccagctgtccctgcacataaagcaccgactccatcaatgcacccctgaggtatcctctttcagggagtgagaatttaaaccttcctctggtgaggcttctattttccaccagccctgctcctggcctctctgctcccttcccaatgagggcagctccacatccagccaagatccaaggaacaaccatgcctgaccctgtcctctccttctcagccacctcctagaatctctgaatgttttctgaaatgaccgtgggaaacaggacagggagaggcatgctgcagcgtatcccaggcctaacccagctcctttcagccactgccatcccaacagaagggggcaagggcctgcagagacaggctgggaggattccaattttggtttccatccccagatactagctgtctggtgtctctttacctgtacccccaaaacacagatacacacacacacacacccctcatgtaccaattactccctagagtctgtttttcctgcaagaactccttctcagcttcttcaactcccactggtctctgtccttcccttctcccagagctgggcctcatgggtgctggcagcagttgagactgaatggtgaaggaggtaaaacatgactctggaagcacatggctctgccctctctagctgcatcaccttgggcaagtcacttaacctctctggtctcaatttcctcaccagaaaaattaggataataatagtacctaccccaaacatccttgtgaggaataaatgagttaacctacataatattttagagtaatgtcaggccagcagcaaggactgtgttaatgtcagctctccttgttactaaattccagggaatatgacacagtaggagaagcatggaacttgggagctgacagatatgggttcaaatcccagcaccccactgactccacatgtgaccttgaatgaaataccttactgcccagtatcctcctgtgcaggagggggactactgatagaaccttacccaatagggttaacactgggtgtggggtgtgccagccctgaagagtatagaggcagctgtagggagaggagtcaagctcctggaatctgatcccccagattagttgctgcactctggggtgagcagagtaaactggtctgacttggaaagaagagccagagaccagccaggaattcaggcccccaggaggtgccataaatagctagagcagatcagagggcctccagggatggcaggctgggagacggggaaggctcaaaggagcagtgaaaaaggaagctgtcagtcatcagtctgggggcagacccaggaccctctcccaaaggtcgaagggaaaactgtctataagtaagacagaagaaaggggtcaactcttaaggaccagcctgagaccacctgggcaccattcactctgagctgttgggagaggcaggaaattctcgacacgccattcacctgtggtcttcacaagcccactcggcgccctattttctgccctttgaccatttggaaatagaaatcaatagcacagcctgtgtcacagatgggaaaacggaggctcagagatgtcaagtgatttgtccaagatcacacagtgaatcgggctaagatggggatatgaacgtagaatattttttgcctcctaatccagggttatacatgacagccaaaatagaaggccctgtcctcagggaggaagtctttcttgcaggggaacagtgaactgaaaggatccatcctccttgctttcctccccaagacattttactcttcctccgttgatccaagcatatcaccctagctgggcctgggaagtgtgagagggatgcacatttataatgcttcagagatgtttcatcaaaggtagctgtgcgcagccctgggaataggctraacttgaacttgggctctgaagacctgaactcaaagcccgtgtgatcttatacaaatcacttcacctttctcagccacaagtccctaacttgcaaaatgaggcccataattcacacccatgtgagactggtgtaaggactaaatgagataatgcatgcttgaatgcttgattaatgccccaaatatgataaaagctgggatcccctggtgagccagcaccttatttatctctgtactcttggtatttaccaccgcacctggaacataggaacctctgataaatgttgactgaacaagaaaatgaagtaaactctttacatttaaacgtggtatgtttgtgtgataacaacattctttgcagtttatcagctgccactgtctttttattgtggacacaggcactattatctctactcagtgctttattccccccgaaaaatgtttgaaaaaataagatccagataaaaatgctttcagtggctgggcgcggtggctcatgccacccagcattttgggaggccaaggcaggcggatcacgaggtcaggagatggagaccatcctggccacatggtgaaaccctgtctctactaaaattacaaaaattagctgggcctggtggcacatgccagtagtcccagctactttggaggctgaggcaggagaatcggttgaactcgggaggcggaggttgcagtgagccaagatcgtgccactgcactccagtctggtgacagagtgagactccatctcaaaaaataaataataataatccttttagtagtaaatccaaaaggtaggggaccatataatttattgtccacagcgggacacctttgggagtaaaggggtgctattagtaattatgtctggacaacaggaagaaaccatgactggcaaaccaaaatgctgggcatcacactaacagagcactctgctgctcagactctctggaggagtgagccctaaatcttccaaaccatcttgactcctcttctttagtcagaccctccaaagggtgccctaccctctcatccccaccagccaaacccatttggagctgttttcagatccgttccccagtgttcttaggttcctcattttcaacctacaagtgaccctgaccccttccttctgcttccctgagaatggcctagagtgtttgcactgctccaaacacgaagacttttgcctctgctaagtacccatcatgagagctgcaaaaatcatctagccatcctctgctgctgttccggctcagggtcttttctatgggcccccatcatctctctctggcctcagtaggcttctcactggtcccctgcctctgctcttcccaagtgctcagaccacctgtctcacctgttcagagacaatggcttcccacctcagtctgagaaaaagcaaggtacttatgacagcccataaggccccagtcccttttacccttgttatctctctggcttaatctcttagaactcttcagtcacccagatgtatgtcctcgctagttcctcaaacaccccaggaatgctcccttctcagagcctttgctcacgttgttcccttccttggaacgctttcctcttagacaaccaaatgattagttcccttgccttcttcacgtcttcttcaattgtctccttttcaaagtccttcaccctggccatcctataagtacgtaaccccacctcttagcacttcctgtttccatttcctgtcttttctccttggcacttgtcatcacaaaatagaccatgtattttacttaccttatttgttgttcagttcctcaagctccacaaatcatcacagcagggattttcatttgctttgttcttttgccatattcccagtacctgaaacagcacctggcatagagtagatactcaataaatatttgttaagaagaataaaagactgactgtgagggcacatagcatggaggttgaatatttggcctgaagtacaaaagcctgcattttaatcccggctctgcacacttctgtgactcagtttacctgtaacttgggataatacacatcgcctcccatggctgtggcaagcatgcatctgatttcatttaaacccctaaacccactgcctggcctgtttcaaaatctctgagctaagtaaatggcagctattgttactcagggaggctcctgatcgatttgacattacattatggctttgtaacaggcaaatcagcacccaccgcttttgagtcataactcacacacttactccccaaattgtcagttttgatcccacctctgccaggacccctcctttcctgaacccacgttcccccaaagcaaatggcctgggtctttttgcagtcagcccctttcaacacacatctcctcctgtttaaatctcagaaggccaccctcctaaatctcaggatgcctgccctggggccccttccacactctcccccagtggagctagggaatttgggtgggaaacaaaggggagaacataaggtgagctgagagggagagggagaagagagcaggccaagccatacccacctgccaggttcctgtctttgcctactgataaataggggatactaatggccagattttccattcccccaccccagcacccgctgtcactcaattaaaaaaagatagagggagagagcctgggggaggggcaggaggccttggctataaagcctgyggctaagtggggaaagcacgaagcctggcctgctgggtccttttcccgtcatccccagccagatttagctgctgacagctgcttgggactctgccgccagggcctggcccagacctgcctgcctctctcctctccctcagtgactcctgagccacagcccctccatggcccagaaggaagaggctgctgtggccactgaggctgcctcccagaatggggaggatctggagaacctggacgaccctgagaagctgaaagagctgattgagctgccgccctttgagattgtcacagggtaagcctcagatgtgggtyagggttctgctccctagaagagtgcagccttgggttaggctgtggaaattcaggatggttatattaggcgtcagggacagctacaaccctgcagcagtgagagtgcrccagtgggcccggcaggggtggtaggggacccagcagcaaattctcttggcttctcagggtgacaccttgggctctctaatcagggagaggtaggaggagctccttggaggcaaaagcccagagaataaaaccacccttcaggcctcctggtattgggatggccacctgcctctctgggtagaagcttagtcccagggagtttggcgaggacagaggatgagactggcacatctatatgtggctccgttcaaagcaacccttcccctcaacttctctgttcctgagtgggtctctccgctagccataggcctctagccctttctttagagcttcttcctggagtagatgctcccaagacaggaaagatagatccatcctttcccaagactcagaagcagcttttttcttattaaatcttttgagtctcctcaggggctgtcccacagagaaacagagaaattacatgcagataacgcagcccaggagcttatggacacaggagctgttccaacatgctcaggcattgcctggaggaactgggacccaaagaaaagggtctacagactgcaaggagggggctgtgtgcagggtacctctgtcttatscagattatgccatctccaggaataaaactaagtagtcttcttcctcttccctttctattcctgtagtggaagacccttctaaatcctgagcaaagaataaaaagagaatctatgaggccatatttcctccttgaaccaaacgttcccttcatggggtctccaggaatgaccacaggcagagtgggtgcgagactaagagaagtttcaggaagaaaggaggcatgatgctttcaagggggaaaggaagccctgagtggcaatttggacttgatatttcaagcttgacaagtgattttccagtcagccacagttttagcacttataacatgaagatctatagtagtaaggtcccttccagctcagatgttttctgattttcaagagaacctaagggaaaatgcatcctatttcctgaggcaagagtagcccctgaatttccatttgcccatgcccacccaactaatctcaccctcatcctaggattaagggagcagctgggcacagattaatatagacacagggaaagcctaaggcagcctggccaggagagtcctcaattccagtggctttcttatggaaggagagcctttttctaacacctaagcatgctggtatacgctatccttagtcatacacacacgcgtgtgcacactacactcttgtgtggctttccaacacagagggagggtaggtcaagaacagaattagactatgtttgttcagctgaacatgctttgggggtcccagagcaatggatcctgaagggwtaagtccactgatataacttacatttgtccagggctttataatcacaacatagtttcatgaacatgagaccattcaacactcagcacaaaggtaggagagggagatatattattgccactttacagagggggaaactgagactcagagagattgaatggtatgtccaaaaccacagaactggtaggtggcacatcttcttactcccagcaaagtatcctttctactggtytcttattcattctgkatcccaggtttcccagagctccacgttatctctatctgggaggtagtgaggacccaaggctcagaaaaaggggcacagaaggggcaacgttctgagcattctgtgaacagttcaggtgggagcagagcgctgagtgtttcctggccacaagtaacagctgtagagagctgtctcctgggcccctctgggtaaacagatggcttaaaatagcccagaggtgcagctgggtctgtgcagggagagggtgagggaatagctttcctctccttccctcttgagatgcattccccccaggactccctcctggagtcaagggggtcagcaaagcagcttttctagcctggtctcctatagggaagatctttagtgctccttatatttgggccaaaaactagcagaagagcaggtagcttttccggaaacagtccgacatgaggagggtagctggtaggaaggagagatgcccagctcatagcgattctggttgaatagggcattcaggatagaaagcggaactgagcacattaacaaaataacatggtagaatgttctggaaaagggcctaagcctgccgtagcgtgctgaagccagttcctgttggttcacaagtctcttccctactctgcatccagtgatatcacctcgggagcttgaaatctctgtaatgggagtacttaccttatggaaatcagcaaactttagaaattggggattcttccttctatcagagagatgagtgttacacttatcagcacaccattgaaaaccagaaacctctgaaagtgagaggaagagcagtgggaaagggatcaggtttggtaatgcttaagacggagctctgaaggatacaatttgaggcctggagaaggcatcatatgtatcatacatcaatttcctttttcttttttggagatggggtcttgcttcttgctctgttgcccaggatggagtgcagtggtgcaatcacagctcactgtcgtcgcaacctcccgggctcaggtgatcttcctgcctcagcctcccaagtagctaagactacaggtgcatgccaccacgcccagctaatctttgtatttttatagagatgggttctgactgtgttgcccaggctgctctcaaactcctggcttcaagcaatcctcatgcctcagcctcccaaagtgctgggactattggcgtgggccactgtgcccagactagctttgagtgtctactgttgtccaaaaccttagaagttagattactcactctttcaggtgaggaaactaagcctcagagggattaagtcatatggccaaagcttgttgatggagtaggatgtgaaccccaggactgtctgactccaaatcatcacactgcatccaaaaaaccagagagrattctttttatatttactgaataagagtttttcatttactgcctgtttcccctgttagtatttaacctctatgaggacagcactttgtctttttcactgctttatcyttagcacctagctcctgataggtactcaatacgtatttgttgaataaatgaatgacctaatgaataagaaccttttgggtggttcttaggctctctgtcagacaagacagggaatgaactgggggagggtttcttgaggacagcagctcagggtgtatgacgatccagcaacactagryttaggtaagaattcccctggctcatgcctgcttctggacacagcacgttttagtagagctctggggcacgagagctggttgtctccccagctttccaacccagtgagaagtgactgtggctctgcctggcagcacccttgatgtgagcttggctttgtctctagttatgttgtatatgtttttacagaaagcagaacctcctatcccagggattattatggaacaaagataaatggcacacagagtgattcttcttctaaccacttctttagctaccagtagtttactctagccatgtaaggaacacagagaggcagtgtccagaggagaagggtgagataaggagtgaggggacttcgacaccagttaacaccagccacagccctttaccctcaccctggcctctggagcacgctgggtggtgtgtcaccaagaagagaaggcagcgcactgactctggccaacctgccttccacagagggttgggggcaggtcaaagctcaggtgtgaagaccatgcctaccagggaaaacaggcaagttcagggtttcccttgggcaaaatcccatccagtcccacagtctggagttcccttctcagctctagggagtcaggctgctagaaccctctgctcctgctcttactactctttctgattatgcccactccttggtatccgctttgaaaagtggtctgagaaagcagaaggccaatgaaaccagcaatcctccctctttcacgccagtcaccaacaggtctagtgagggaaagctgaaacaagtcaacacataattacctatgagtagatttttccactcatggattattctggagcaaatgtttaatctcagtccagcttcaactgccctctgggttgcttcctttcacagtatagatttacgcttagaaaattcaaacgttttgaatgtgaacctgagaaaaatgtattacatttactcacatcccttctccctccatcaagcagattatcttcccaattttttttctagatatttggactctctgtttcctcccaagtgaactgaaatgtccagtagcctgggtctaagcagatgaagtgtgactggtcttgtttggagaaagtatgaggaaatggtgcttaacaaggtgctatcagaggctggggagagggaatagaaatcaggctgtaggtttctacgcatgaggaagtgactggatcagggaaagaaatctactaccagcatctctctcctgaccaccacccaccaccaccaccccaccccacacacacacacacacacacacacacacacacacacgtttctacgcatgaggaagtgactggatcagggaaagaaatctactaccagcatctctctactgaccaccacccaccaccaccaccccaccacacacccacacacacacacacacacacaggtttctacgcatgaggaagtgactggatcagggaaagaaatctactaccagcatctctctactgaccaccacccaccaacaccaccccaccacacacacacacacacacacacacactcacacacacacacacccccacccctttaccagtaaaatattttctgggttaaatgtaaagggctatagttaaatatgatacttaggcctatcatgctacttaaaaaaaactgctggtgatgatttaacaagttaggtgtcattatttccttccttccactagtgggcataatagtgttaatttattctgtgagtctacaaaattgcccaagatggccatgttgtctagttccctggagaaattccagacttctactacctctgttctcctggtttccccccaggacstagctatttcggtctgtgagaggcctaaagaatctcatctgacctttttgctccttctagaagaccaagaaacccattcagaaatcaagcaagtttagtctctgagcaagcccaagggaacgactaggaaccaaaccttccctgcctttcctttgctccttgaaagcacttcttttcctgaggcatctagtccagaaggccctgctgagggacagagtagattctagggctgctggccagaggggttggaaacccgtatttatagagagatgacctttcttcctctcccttgggtttcaggtttctttgggtcttctcctcttgcctagggaagaggaggaggggaaaatgtcagagcttaagaagggcagaaagaaacagtcacctcacaaccatcaaagccaatttgcaattgcatgctgggccaaattcacactggcctaaattcatactttcagctgagctatagggagctccagaaggaaaagagggaccacacrgcagctactgtttaagcttccaagctatttgagtagccatgaatacttgccagggttccacctgataatccatcatataggtggccctggattagacttggggagtggggcaaaaggtcttgaagagcaagtttgggcaggaacggtaagctctgagcttctcaaaagcaaaaagccactccaggaagtgaagggaccatttggcaactggtaaagttgaggagtggtctggtggggtgagtacctttggggagcactcactataagtgaacgcctgacagggattgagaagaggagcagggaaacatcaggcgatccattctcctaaaatgttaagtaaacaataaacacctccaactagggacacaggggcttagagagctaagtatagtacctgatggaatcctggggctgggtcctcaaacacatccatctccacagtggaaaatgaacctgacagcacgggacatggaaacttgggtggatacattttggtgatgggtgggggtgagggaatcctgcagggaaataagtcaagtttactcatatctttggcatctgctgctyatccctaggcagccaaggccctgggataccagggattcccctgcagcccagggagtctgttgacttctttggggaaagagaagaggtggagacaggcaatagtagaattaatggtgccataggtatctcttgsggcaggcagagagattacatttttaaaaaggaaaacattgaatctttctagctggtactcatctcctcctctcttgacatttttcatctctcctattaaaaattcattttctttggacttcaaacttgaacaaatcttgcctattttagaaaaacacacacatacacataaaagtaaaaacaatcttcaactctgatgtcttctctggcccttctcttttttcttctccttgttattaccaaaattttcaaaattcctggacttttcctgctgttttcatttcctaaccatccatctcctcctcaaaggcacccacacaattcatcaccaagtttagtgtcctaagatacctactggacttgttcaatttgaggcttttcctcagcttcacactatctgcctattgccaagactgtaatcttgcatggacatcatttttattgttttccttctcaagaacctgtaacaattctctactgcctcccgaatcaaggccaaactttcragaaccttcataatacttcctttactgtacctatccaattttagcagtcttataatgttctcagctgttttatttacatcttctctgtccagctgcaatctagctgctaaattataagcatctggagggcagagaccaagtcctttaagatttggaggtgactcaatactaaatacaggcttaactatcccaagatacccttgagtagtctgtcctcacagataaaaattcttggacacttagcatgtgacaatccctttacctgaaagtaaacagacttgagaagtagtcacttgagaaggagagcatgttattgcaagttttaggccatttcatgccaagatgcaatttacatgagttacaaggaagagaaaaaagcataaaatgctctgcaaaatctttgttttgctctgtcatgagaaattttatatgcttgctacttacctggccacttattggaatcatccagagagctttttaaaaatactgatgcttggaccacctctccacatgttctgatttaattggtttggcatgaggcccaggcactgacattctcagtcttctaggtgattctaaggtataggcaggttaaagattcagtgatttagaaatgtaggggtatgttgtgctggaagagtgatggtggagacaatgtcctagtagggtgaccaaaatgcacacctcagtccaaattctcctctccttcagataaacccttctggattttttaatgctttttttttttttttttttttgtcactgatgttaccacagacaagacctatttatagtaagagtgaatgcatttctgaagtactgacctggaagagctacctactctaggctggttctagaaacaagaacttatcattctttcctgtccttttgtctccttgacctacagagaacggctgcctgccaacttctttaaattccagttccggaaygtggagtacagttccrggaggaacaagacsttcctctgctatgtggttgaagcacagggcaaggggggccaagtgcaggcatctcggggatacctagaggatgagcatgcggctgcccatgcagaggaagctttcttcaacaccatcctgccagccttcgacccagccctgcggtacaatgtcacctggtatgtgtcctccagcccctgtgcagcgtgtgctgaccgcattaycaaaacccttagcaagaccaagaacctgcgtctgctcattctggtgggtcgactcttcatgtgggaggagccggagatccaggctgctctgaagaagctgaaggaggctggctgtaaactgcgcatcatgaagccccaggacttcraatatgtctggcagaattttgtggagcaagaagagggtgaayccaaggcctttcagccctgggaggacattcaggagaacttcctatactacgaggagaagttggcagacatcctgaagtagggcaactgggctttgcctcacgtgagttttcctggtgccatggcaccaacactttattatgttaactccagtagaaggtgtgaggtcaggtagaatctgtgatatgtctgattttcctttggaagggtttcatttctctgcttttgactggttgcaaaaatagtttagaacatgtctctttcctctgaatccctctctaaacttttccctcccacacttttgtatcaaagtaactttcccctaacttagaatactcaaggttgacaggaatcctaaaactttcatgaggcaagatgacgttctttggtaagatttagatggtgcaagcacctgctactgaaccacagcagagaagatactgaaatcctctgagtatgcccctgtgtacatgtcagggattactaattccagacatcttctagatgcctcactcccatatccactggcaatcttaccattccatttttctctaatgaatgttttttagtccttcagggacaattttttcacttatggtaattttgaaattccccaaatggactggtatttaacttgttttaagccagacctgctttcatgttttcaaacaaatggctacactttgaaggagaccaayaattgctgtgtgaaaatacaatacgggaacattttccttatgttgagaagacctcagtagaattcatggaggatgtcgaatgcaggaatggggataatatagcaacaagctagtccatgcaggaacatttaaagagttaaaaagacatttgtaaagtaggcagcagctcagaagtaacctcttacagatatcaagaggtgataggagaaagattagctatttaagcaaataattaggacacaattaaggccaatttggcctcttgctgagggtaaattaaactctaacagaaacaggctaattaccctcaggaaagagggctaaaggatcctttactatcttttttacatttagtctgattgagtttgcgcctacagaaatgctatgacgaagccccctttgcaaggccccagttactgatcaaaatcttccagtaatagaggaggggtactcacgacactcttacccaactttaatcctgcaacaactcacatattactaaaacatgaaaacaacaagcttccatgaagataatttacttttggtctctctcactcctaacacccttaagagaagatgtcgcttcatagacacgtttaggaaatatcaatgttccagagcttgatgttggcaggtgttttctattagacatgcacatgggcacctgatcattctcaagctgagcatttgccaacccatgaagatacaactttcagccatttcttttaaaaagcaggacccagtcactgaagtcagtgagcctatgatagggtatactgtgtggtactctgctcacataaaataagacactttatagtggtgaacagtagtcaaaacagatttctgagggtgccctctgagaatataaaatttaacytttagaattccttgaagattttgttagtgtatgtactatcactgtaattataaacccaacatagattctacagactaaccggcagcttaaaatttaaccccagtatattttcctttcagacatctttcagagtcaagggcccaggtgcctaactagcaagtccttagagcttttttttttttttttttttttcagtgatttcaaatataactgtattatctggacccattaacatgcttccctgtcttctatttgaattgctcatgtttgtgaagggaaaggttaagatatatcaagttaaaaaaaaaaaaaactggcatgagataagagtgtaatctaaaagcccaaaagaacaaccctgcttaattaaaataatcttgagaaatgagcatttgttaaataaagtgtcttattttacatacttatttcatctttcttttttttttttttaatgacaaaatagtatttaatcctatatttagtcaaaagaccagagttaaaccagatctcttctggggctttttctgtgtaaaccacatcaaaacatgaacgaaagactggcttctggtttagtcaatcctggtaaatttacccaatcctgcaaaggaaactatggaggagaaatccagggacttgttgggaagggcacacagaaaccttagttcaaaaagaaactagtcattgttcggggccagcagagctctcagtaacacattttctttgtttgttttaccaaggtattcctgctgccaccaagagacagcaatgacatgtacagccatctgggacatgcctgtcttcctaataccatttggagctggacaacatttgacaccaaccaatcatactggacaaggcccttagaggacttgaaatatacttctcatgctgtagtttatttaggctgtgactctctctctaatgctgctctcgggaaggacgaaagtgacctgcaaggagagaaatgcaaccatacatgggctccagtcaactatgggactgaaggtcctaattgctcacccaagggggctgcttaacacaaacagcctcagacccgaggtttagatttctgaaatatgcattttatgttaagttgggtatttttttaaaaaaagaaaaacagcaacattaataaaagaagtggtgtgtttttcccgtggccagatttttaagaaacttgaacatctggaagttgccacagacaagcgagctagtccagacacagggacactccaggctatgaaccaagccatggttaaaccaagacttgcctagacaatgcagaataactctcccatacagacttcttacgacaatcaagtgagggcctttcccttctctgaaggcaagtaatagggcagaaggtggaacaaaaagcatgagaaatctaaggtagccacatcccaaatgccagttaataagcaactagcttctttattagagaggagcgggtgaaaagtagtagtttaatgttcagatatacaatcatttaaaagtattcaatacatggtgtttgatggtaatggcaggatgatgtcaagtctctctttttttttttttaaaggtttgtttgagtcctatgtggaagcaaaaattcacaggtgaatttccgggtgtttgccaaactctaactaggtttccaggaataatgtgttcactctgattaccagggcatgcctcctttcctcaggcttcaagtgtgataagtcgtcggaatttgacccaagactactatcggcaaatgacaaagtgctttatcacattcctgctaagtcccagaattccacttacagccaatcctgaatgagactaggttttgtctaaagaatcaaggctcaaacgccaagaaaaaaataataataataaccataatctctttaaaagtaaaggaagcctagaaaatccatgttttgacttgtgttaaggtttacagatggtactcaatttacaatggtttgtcttgcaatttttggactttacaacggtgcaaaagccatacacattcagtacacccttcaactgaactcaacttaagatggggttacccagacatagacctaagttgaggagcatctgtaattgcagagttaagcaaaatattttaagtttctttaagtttcttatcccccactctcactttcaattttgtgtatttagataatctctccttcctttttcccttcaactttatgtggacaaaagcaatgcttcaagaaaagcctcaatctaaaagtttgataatgaacttgaccctccactgcccctaccccaacaacatgaagaacttgtctgttccacctagaaatacaaaagtgaaatacttttttgaaactgttgcctcttatcaggctgatatgtgataagaacacagtctaaagtacaaagattatatttaaccagtactttcctggtgttttaaccagccccttctaaaatacagttgttcttttatacttgggaaagcagcaagtcctgtgacagacccaaagtcactctagggagaaaatcaatagcaagtctggctgttttaactctcamcaccactgtaagggaaaacaagaaaatgtctagtttcccgaatagctctgatactgaaccattggctaaatccatgaactttattttcctaccatgaccacaatagacgactggtctttgcagcttcggaagaaaagaggactaatatttagaccccagctggctgcacatccaaatcttctatggaggttaaaaacacaaaagtggccatcccactccaccaccaaatttttttttttaattgagatagggtcttgctctgttgcccacactggagtgcagtggcacaatcacagctcaatgcaacttcaacctcccaggctcaagccatcctcccgcctcaacctctagagtagctggaactacaggcctgcaccaccaggcccagctaatttttaatttcttttttttttgtagagacagggtctcgctatgttaaccaggtttgtctcaaactcctgggctcaagtcatcctccagtctcagcctctcaaagtgctgagatgacaggtatgagaattttttgagaggaagtggcctttatttttttaaagaagactcataaggatttttgacaatcactgatttattgggtcactagtctgtgctaagtactctgccaggcatttaacatacattatttcacttgttttcatgattaaattcaggcaggttcaatcacagaaaccatgcagtggacaaaagagagaaaaagttcaccatgaggagattctaaaaacctgccttttgacttgtctatttttatctcttatttctcactttgcttctcctcccgcttggaccctttgtctgactgtttgaaattaagttgcaggtgaaccctccattacccatgtccagaacaaatagacataagcacagaacctcactaactccccaaatttttatttttccatttttatcaccacaaatttcttggtaacaatgtagaatttaattttgtaattaaaacaaaaactctcccctaggaggaatctgatgacataaggataacaccaagttatgtgcacaaacgacaaaaaatgccaaactaactggaatgatcatccttcctgaaatttctcttaaaaagcagagaagtagaaccaatgctgccacctagtggccagccaaacaaatcaggtagcatactggagaaaaaggtcatagtcccgacaatctggtttccctgcctattatcaagccacctaactccttacttttccacaaaaaaacacaaccacatatcttaagcaagccctcctccacagtcataatccaaatacttgaatacagcaaccaaagtctgtcttgttaaacacactacttctcatgaaactttcctctgcctattttaaggtaggtttgcccggtcctatggcccagtagagatgacacaggagaacacggaaacatccaaaatgttcactggttcagagtgtgtacacagtaattttgatgtctgttgcctcaaatacctcctcgatcatcgcagatacattttcccattgcagacgatcaagaccacatccaatcctgaaaaagacaaaatatctccattgatggtaacgaaagtatctaggaaactgctcctctcttttaagctatatccactcaaagcataaaaacaaataatctagtctgacacccttatgggcaaccatggtaggagtttggaagtcaattcttgttgtgagtcaccgaagaccattcctagacagctctaacatccaaaaactatcacttctgtttgcctaataagatactactttccaactatttcatgctacatttagaaatgtgtaactgtcatgacattagagactcattatccctctatgactactgactaaaattggctgtggatggatggtgaaaggttggtattttaaaaatgcacttatggtaacagaatgttaacgaaagtaaggagaagaggaatgaggtacaggatctgcaaaaaagaaagtcaagagggaatgctgggaaatggtaagatagttgcaatccaggagtaaggtctttgcaacaccctggtaagaataaactcagtccataaaactctactacttggcaccttccaagatgttactctagtgatcctcaacacgcctagggaaaaaagagacctaaaattggtaatttcatgtcataatgtgataattaagtccataaggaattgtgattaaaaaaaaagtttctgatatgtatgtacaccataaatatatcaaagaccagtgtaaaataagggacatttgaggccatatgcaaagtaatgtggggcgcaagataaaactgcatgtatgctcagcattgactcaaaactaccagggtgacaggaagaaaagaggtgaggcccatttcctgaaaagaaagcaaagggactactgaaccctcaatgtcattccctaaattcccaatagctaaagtctaagaagttacatcagggacagatcctctggctattacccatactgaccaaaacaagtgtgcagtataaaagggaatgataatttacaactttcttgacgcaaagtaataggtttgggagatgggaagtggtccaagaggaaaaccaccattgctcagtcttgattctttagcttacattgctttaggaataaaggccaagcttcaagcagagggtgctgagaattcaacaaatgtagctgaatgacaatggtcgctctctgctaagcaggctgaggcagatgtatatttcaaggtaattgtcctgattcattcaactcaagctagaaaatggctgtgccttagtctaaagccagacaactggttcactggtggttttacaaaattttgacttttgtccacctttaaatctatattttgggttaagcttttaagttgtttgtctttgggtaagatagtaaaccccaccaatcaattaaatctccatttaggaccatggatttccttgcctgggcatggagaggtcagtgactccattcttcagacaatgagacttcattgcctctaaactcttctgtaagttttcataagttggcttgtgcgaagcccttttctttgtaatctgaacacaaaggattcaaactttcatcatcccaaaatgatagccaaagaaaagtcatcacattcccccaacatcccrataattaaaagagtaagcacatttttatagaattagtctagagcaaggatgacaaatgtcatattgccctttccacactgttatgggagaccttcaagaaaatccactaaatagaggctgagaaacccagactctgccacgtagcaatctttccttttcctaggaaacccatgagattagcagatgatgcctattgtcaatatttttaagcaaggtaagtgaagtctctgtgccacttccaagagataagctgcatatctctaacagggaagaaagcataccacctgaaaattccctgctaaaagcctctacttatttagaaactgtgcttgcttgctttttgtctctctacataaaacaacagaaaaaactggtagggtcccaaagtaaaaccactggaagccacataagctttaaggacagaattcaaaggggctaggacatctccccactcagtttgtcatccagatcaggcttgtagtgggttagctgtaagctacccaccaccaccactaaggaagccacaccctttcagggaccaaatgccatcctggactgttgaagaaccccacattcaggcagtagttaggagaggagctaagtattatttgggactgcacttattattttttgtttttattcacccccttgctatcagtgtgctatttgacatggaataagagaaaagctcctttgggaaatctgtctcttgagacattattgtttttatctcactctgcctaggaaatatagtatggcaggcattcctaacttttgcaagtcttagaacaggcctatggtacatgatacacgactttcccacagagctgggatgcagcctcacatttctttctaacccagtgctccaagtagccgccatcactggactggagttgtcataagataggaagctttttgacattcttagttgtctagaatagaacatcatgatcaacacaaatgcagtgcagcccatctgttcacaaatccttaaaatgtattaagaactggccctgaaaaaaaaaggaattggccccatcttaccaagtaatatatatatcgcccatctctcttcagaacagccacttctccagatttcttttctragaaaaagttatttaatagtagaaatgaaaaagaaaaccaaacactgatctctaaagattttaaaatgtttacagatctgagtttacctcagaactagaattttcaacactgaagaagggaatagggaagacctattgtctcccacaaacactttgctttttatcagcattcccaaatactatattccttaacttaacagctttcttacagtcatgtttcctcacaacccatcttttgtcccactactacttttaaatatatcctcatttgtccacaaactttctctattgccttgaaattgttttatagtgtgtagttttttacttgccaaatgtgtatttactcaataattatctttttacatacaaagagctgtataaggcattatgaggaatacagatatataaaaaaggaattaattattacagagttttcaatccagagaagatatcatcattccaaataactataatacaaagcagtaagaattgcttttgtctaaggctaagaatcactgtggacactgatgctgttaagcctggaatgtggtcggagaaactgttgcagaagctttacataggattctagtgcacatttctggtttaaagtggcccgtagaaagtgatgggaggggtctgtaaggaagaagaggtttctaaattcctctttgaagaaaaagcagaatattggtaagtaaaggatcttgaatgccaacctatagactaagcatctcagagttatttcaagtttcagagaagtacagtaatatcgtcaagaaagtttcatgatacaagaggaagagattaaaaaccttcacaggagttgggttttgatatggtaaacgtctaaactagaggccattcttggggaggaaaatcttaaaaacatttggttcttaggaatcccctctttacacgcatattttattaaagtgtaacagattaaaaggtgctctagccagggcaaatcaggtaagtggtttccaaaactcacgttgatttaaaagttcttgcacccctccaaatttcttcttaaagagracagctatcccagcgcccatgcgacaatcctcactgatacagtgggctaaagagtctgttttcgggcatgcaaaaaggtctcctttcacataagtgatctaaaaaatgtgcaaaggaaaagacaatgttttattagatacagtaaaatactaagctatttttctgtattttgtgtcccccacgactacctctcccggcaccccttcctccaatctgatttaaagccaaaccaattacagcatgtgtaaaaggaaagtaatggatgatccctgcctagaattttgagcctttttaaagtaaatcagctagagagaaaaaaagataatgcaatcattaatttaattaaaaagtgtttatgcttttgacctccattattacgaatttcagttcaccaataagtcaatagttgttacgcactctgctyccttctggatcttcattaaggctgctggccatgatactgagtcgctatttccagaatttaagtgtttcttcagctatgagaagggaaaaggaagtaaaaatgcttaggcagccttagtatataatattctgattgccctgtacaaccacttaataggcttttttccccaacgtttatcgatgaatgtgagtttgttcggcccctgggacgtaatacaaaacccttctggggcaaagaggaagaacgcttaggttcggaggctgtctcgacccgctctcatttcgtgctttcctggagcgccccgctccgtcagcggaagcaaagcccatccctaagacacgcctcctcctttctccagggccactccggagcaaggccgatttaggacggtctccttttctctgcacgacgcaaaagtatttccccagtgggtctggcttagaagaaaacagaagggacttggccacagtcccgttaagccgcaaccacagagtgtacagggtactggcgtgctgagccccaggcgtggggaaaggaaggcggcctctcaaggaacgttcaccccccacttttttggggggtgcgtgggagaaggaaagagtctattgaagcctcccattctctgtctcctaccctagggcgggtcagcgaggacgcagtctgtcctggggtcctatgggagggtgcggggaggctcgctcaaagcc

SEQ ID NO: 95550 - DNA, 71238 bp, Homo sapiens
  misc_feature (1)...(71238): n = A,T,C or G
tactaaaaatacaaaaattagccgggtgtggtggcatgtgcctgtaatcccagctactcaggaggctgaggcaggagaatcgcttgaacccgggagatggaagttgcagtgagctgagattgcaccattgcactccagcctgggcaaaagagcaagactccatctcaaaaacaaaacaaaacaaaaaaaacactagaattactagatctggactggacaggcagggcttgcgaaaggatcaagtctttggctacagatttattacatccgtctttggaagaggaaaagaaaaatcataaaagaaatggctagttcaaagtccaaattcttattttatggttgtaaaatgttgagattgtcccaagattaccatagttttcagccatgctcagacagtggttctttgtgtgggttgttcaacagtatcagcctacagaaggaaagcccagactcacagagggtgttcacttagaggaaagcaacacaaatggagtgatccacaccacttcctgaatctgtgttatctcacagaaagccttatcataagtctagcaattctaattcatctaccaagataatgtattcataattatgtttgattttgcaaagtatacaatagtgatctattttggtgtccattttccaataaagattatgagcaaaaaaaaaaattactatatgatccagcaatttcacttgatctgttgcccaggctagcgtgcagtggcacaatcatggttcactgcagcctggacctcccagactaaattgatcctcctgcttcagcctcacaaatagcagggactacaggcatgcatcaccacgcctgattagtttttacccagccaaaaaatcattttattatggaaacttcaaatatattcaaagatgaaaaattgttataattaattaacccagagaaactactcatcccctcttttttttttttttttttttggagatagagtctcgttctgttgcccaggctggagtgcagtggtacgatctctgctcactgcaacctctgcctcctgggttcaagccattctcctgcctcagcctcccaagtagctgggattacagccatgtgacactatgcccggctaatttttgtatttttagtagagacagggtttcgccttgttggccaggctggtctcaaactcatgacctcaagtgatctgcctgcttcggcctcccaaagtcctgggattatgggtgtgagccaccatgcgtggcctcatctcttctataattatcaatttaaccaaccttgttgtatctatacctatacctcaaacctggattattttgaagcaaaaattgagaacaagaccctgtctcgaagaaaaaaagaaaatagacaacacaattgaaagcaggagctcaaagagatatttgtacactcatgttcatagcagtagtatttaaagtagccaagagctacaaacaacccatcattgacagatgaatgaataaagaaaacgtggtatgtacatataatagagtattatccagctttacaaaggaaggaaattctgacatatgctacaatatggatgaaccttgtggacattatgctaagtagaatatgctggtcacaagaggacaagtactgtatgattgcacatttcctattagctacttggtacattttcttttattttttgagagacaagggtcttgctctgtcatgcaggctggagtgcagtggcacaatccagctactcgggaagctgaggcaggctgtcgcacaagctggggtgcagtggtgcgatcttggctcacggcaacctctgcccccagggttgaagtgattctcctgcctcagcctcccgagtagctgggattacagacacccgccaccatgtccggctaacttaagtatttttagtagggagagggtttcaccatgttggccaggctggtctcaaactcctgaccttaagtgatctgcctgcctcagccttccaaagtgctaggattacaggcatgagcctccttgcccagtcaaaaaagacattaaaaaaaaaaaaaaaaaaaggcccagagcagtggctcatgcctgtaatcccagcattttgggaggctgaggctggcggatcacaaggtcaacagatagagaccatcctggtcaacgaggtgaaaccctgtctctactaaaaatacaaaaattagctgggcatggtggtgcgtgccagtagttccagctcgggaggctgaggtggaaggatcccttgagcccaggagttcgaggatgcagtgagccatgatcacaccactgcactccagcctgggtgagacagcaaaacctagtctctaaaaagaaaaaaaaaaggtggtaagaacagattttaatttgtaatatactattgcaatagggaagagggtccagcgtgaacttggcccaactttgatttgtacagaagtgactgggaatttaaatttattttttagagatggggtcttgttacgctgcccaggctggtctcaaactcctgtcctcatgtgatcctgccacttcggcctctagagtagctgggattacaggcacaagccagtgagtctggcaagataacttgtgttttttgtttgttttgtgacagagtcttgctctgttgcccaggctggagtgcagtggtgcgatctcagctcattgcaacctcagctcattgcaacctctgcctcccaggttcaagtgattctcctgcgtcagccgcccaagcagctggaactacaggcacccaccactgcacctggctaattttttgtattttttgcattttttttttttttgagacggagtctcgctctgtcgtccaggctggagtgcagtggcgcgacctctgctcactgagacctccacctcccgagttcacaccattctcctgcctcagcctcctgagtagctgggactacaggtgcccgccaccaggcccgactaattttttttgtatttttagtagagacagggtttcaccgtgttagccaggatggtctcgatctcctgacctcatgatctgcccgccttggcctcccaaagtgctgggattacaggcatgagccactgcgcccggccctaattttttgtatttttagtagagatgggctttcaacatgttggccaggctggtctcgaactcctgacctcaagtgctccgcctacctcggccttccaaaatgctgggattacacgtgtgagccactgttcctggcctagttgtgttttaaagtggatgaaggagtagggaaggtggcaagcaggggttcggtagagtcagggacatgaaaaattgcaaaggattggtcaatgtacagctctgtccactagctggcaattatcaaagttaggattctgtcctcccacaaagaggccttatccttcaggatgacgacattcaaggaatggctttcaggtccttgagaaagacactcttgagttgtagaagatacttacacatctcaaaggatcagataaggaattcacaattgtgagccctttttagtaaatgctctgagaaagtgtagtcagagcctatgattgggtgtcgcctggaacagtaaattctttcggcagtggtgcgccttctcaggcaggcactttaaggtgggtttgggtcatcccaggatgtgaccttgagctgttagaaactatattactgtttaagtctctttttttttttgagacggattcttgctctgttgtccaggctggagtgcagtggtgcaatctctgctcactgcaacctccacctcctgggttcaagcaattctctgcctcagcctccccagtagctaggattacaggcgcctgccaccacgccccgctaattttttgtattttcagtagagacggagtttcaccatcttggccaggctggaagagttcaggccacccctgaactccagaccttgtgatccacccgcctcggcctcccaaagtgctgggattacaggcatgagccatggcgcccagccttcttttcttttttataaagagagacagggtttttccacgttgcctaggctggtctcaaactcctaagctcagacaatctacatgcctaggcctcctaaagtgctgcgattacaggcgtgagccactgtgacccgcctctgtagaagccttttaatgtggagggaggagggtgggtaaaatcacttgtgttgagagtctgccggtgttttgtttgtttgtttgtttgtttgtttgtttttgagacggagtcttgctctgccggccaggctggagtgcagtggcgcgacgttggctcactgaaacctccatccccccggattcaagtgattctcctgcctcagcctcctgagtagctgggattacaggcgcctgccaccatgcccggctaatttttatatttttagtagagacggagtttcaccatcttggccaggctggtcttgaactcctgacctcatgatccacctgcctcagcctcccaaagtgctgggattacaggtgtgagccaccacgcctggcccttttttgtttaagacagagtctcactctgttgcccaggctggagtgcaatggcatgatctcagctcactgtaacctccaactcccagattcaagcaattctcgtgcctcagcctcccaagtagctgggattacaggcacgcactaccacacccagctaatttttgcatttttggtagagacagggttttgccatgttggtcaggctggtcttaactcctggcctcatgtgatccacctgcctcagcctcccaaagtgctggggtcgtgatgacatcactgcactccagcctgggcgacagtgagaccttgagcaaaaacaaagagcgttcctgtgctaaaggggactagactgggaccctgcctttccgggtttggctcttcagggccattattaattatcccacacaagggccatccttgaaagaggataccggtgtgttagcagcaaacaccaacagcagaggttatcaggttatcaaggtagtaaccggcagcatgagcaacacctggagacggggtagcaatgccaattctggggcctgccctagagctaaaagaaccagaagctgagggtgggggcagcaatctgcgtttaaacaagctggccaagaggatcccatacacaccaaaaattcagaaccacttcagcctcacttcagcctgttggagggcgaaactgcagtctacctggagtttcataaaggttttgaaataggtgcggaagttagggaaaggatgggctaataaaagacatggcaaatatttaaaatgcattcactttaccctcaacagcaggaagctacgggcatctaagagagagcctgcaagggggagatgccccggtggatgaggaaccaatagacactctgcccccttttcctcttttcctaggtggggaacacaaagtccagcgaggccaaacccccgctcgcaccgctgatggggtctctctcccctcaggccagggcgcagcggccccaccgcagctcgggctttcagagcccgggcgtgaagccaagctggcctcaggtcgcggctctttgagagcgcgagtgggaacagtgccctccggccgggctcgtcagcagctggccacagcagcatctgagaggcgtcctcggctagtgtgcacctccctaggaacccacgtatccaacccggctcggggccgtctgctccagccgctggagcccggccttctgagaatgaagacttcccatccccctccgtctcccctcctgcacggcggaccccctgagccctagcgaaactacaaagcccacaatccctgggatgcgcgcgctgtcttctgggagatgtagtcctggatgcggggcgcccctagcgacccagcgcccgctggactccatatcccagcatgccggcgcgcgtgcggggggcggagggagggagagacggggaggatgtgaatggggtgggggcagtcgcccctgtcccccacccttcccttcaagccgggcaggggtggggggaggggccgggctgaggcggcggcggcggcggcgctcggggagggttgggccaggcaagggcgggactagcccacggcgggcggacgagagagctgcgagctaacgggtccggacgacggcggcggcggcggcggcggcggcgacggctttctgcgcgggcggcggcggcggccggagcggcgagcatggcccgcgcggcgccgggcgctgactgaggtgcgcgggtgggatgagggcgggcgggatgcagagcgccccgggcccccggctgcccagacctcccctgcgcgggcagctggcgcggcccagcggcccagaccggcccgttccagcccggcaacttcccccgggtcggggcgccgggctccctcgtgtgggcgggggtccgcgcgcgttggcctcattccggatccccgccttctgctttgcacgtccagccgctcccagcctcccagggctcccgctccgctcctttgccggcagcccccaaccccaaccccagccccagccccagccctcggaagagctctctgccctggtcccgacttccagtccactccctagttcgtaccgctaaccctgggtctcccggcctctgctccacctgggagaccccggccccactcttggccagagcctgtctgccccatcagctcctctttcctctctcccctgtgatctttcccctacctggcactgccccctaaccatcctcagtggcccagttctcacggctcgaccttcctactttggggaaactgaggcacggctgaagccagaaacttggccaaagcgccagtcccgtggaggctggtctgaacctcgtctctcctctctcctgttccttctctgccttggaatggaagtcatttcttacccccagtcattcccctgtgactggaccaaacttcccaccccctgctacagctctgggctgagctcacttgagtctccccttagcttcctgccgctcctgttggccttccctccttcgcataacccactccgggttccctctgcctgtagaggagtcagcaccaattgcttgcttgctcaagttagcctttcgatttatcttttgccaactgcatccatctcccgtctcccatcttccctcttgctttacagctgcgtaaaggagcggaggattgagtcaaaggtggtgttggagaaaggggctagagaggtgctgggggcaggcagggacctggggcctcttttcagtcaaagcctccgggggrgtacagggcactctgggacctctggccagtaacacactcccgcctcgtctttgggacggatgtttggaagctggttggccaccccttccttgcctggtgggctctgaagcccttctcaggtggaaggtatcgctggtttttagagagatggtggcataagaggagtctgggagaccacacccctaagcttcatcttgcttctgctgctaactttggaggggttgccctttcagggagggatgcctgctggctgccctgatctctctgtggaggaaggcacagagtatgtgggcggtgatctcaagtttagtcgtgggactcaggatttagagggaacgagggctcagagaggtggcacagatttgcctgtattattcaggttttttgttttgtcctcttcagatttttttttttttgcggggggggcagagggggatagtcatccattctaccccaatccccagtttcccagtgggttgggtggaggaaaggagggacaggaggctctaggagttatgtgggttcctgaaggagcaatcttgatctgaaccagatggttcactgcttcagcaacccccttcccagccctcccccttggctgtgaattggatgcttttaaccttgtaacttgagaatggaggaagggaggccagggggccaactgtctgtgtgggtgtttatgtctgcctctgcacccttgcttgcaagtctggcaggggcctgtgggagtgaccctgcctgggagcgcattgttgtgatgtgctgtggcacgctgatggctcctgggaacttttggagtgcaaatcccagataaagccaagcttctgagagccactggctatggcctcaggggagcatttctactccggccaagcctcagggtaaggaccactcttctcgagaaggcacctgggattaaggagtctgcaataccaggattggggatttggggaggcttggtttttccatgtcttttcatggcaaaagaagacctgaggggtagggcctggggagaggggtgggaaatggattattttgcgttgtcctataccacatcctgccttattttggccatatttgtatacttcattttggctctcattagactgtggatgctcttcaaatgtgtcctcattttctgaaataccaccacctggcttggtccttagcacctagtgggtgttcagtaaatgaattacagcggaaggtctcatggttacaggtttagggaaggattcttcacatttgactgagagtcatagtctcctggagagctggttaaggcacagattgtgtgtgtgtgaggggactccagagttttatggtttaatcttggtggagcctatattttgcatctctctccagctccctagggctaacactttgagaaccactggtttggggtcatcacaatttcttgagagattaatccaagcagatgcgaagtctttttttttttttttttctttttttgagacgaagtctcactctgttgcccaggctggagtgcagtggcatgatctcggctcactgcagcctctgcctccagggttcaagcaattctcttgtctcggccttgttggccaccccttcctggggtgacaggaacctaggattacaggcatacgccacgacaccccgctactttttgtatttttagtagagacggggtttcaccatgtttgccagactggtttcgaactcctgacctcaggtgatccgcccgccttggcctcccaaagtgctgggattacaggcgtgagtcaccgctcctggccagatgtctttttttttttttgagatagagtcttgctctgtcacccaggctggagtgcagtggtgtgatctcagctcactgcaacctccgcctcccaggttcaggctattctcctgcctcagcctcccaagtagctgggattataggtatctgccaccatgcccggctgatttttgtatttgtagtagagatggggtttcttcatgttggccaggctggtctcgaactcctgayctcaggtgctccgcccgcctcagcttcccactgttgggattagaggcgtgagctactccgcccagctagatgtagtcttwtttattttattttattttattttattttattttattttgagacgaggtttccctcttgttgcccaggctggagtgcaatggcgagatctcggctcactgcaacctctgcctcccaggttcaagcgattctcctgtctcagcctctggaatagctgggattacaggcatgcaccaccatgcccggctaatttttgtatttttttaaaatttattttattttttattttattttttgagatagagtttcactcttgttgcccaggctggaatgcaatggcacgatgtcggctcaccgcaacctccacctcccgggttcaagtaattctcctgactcagcctcccaagtagctgggattacaggcatgcgccaccacgcccatctaatttttttgtatttttagtagagatggagtttctccatgttggtcaggctggtctcaaactcctgacctcaggtgatccgcccgctggagcctccgaaagtgctgggattacaggcgtgaaccactgcgcccagccagctagatgtaaagtcttaagagggactttcttccaccttacttccccaccaggctgttctggcagctgtactggtttggcttttctttcattctgatgttgcccaggattggtaatgactggggggacactgccccacggttatttgaagcaaggccccacaaccaagcaggaaatttaggagccatggctttggaaaagggtggctgtgtgaagatatcgaagcaaattgctgaaccgggccctcgtctggcctgtgcctgtttccccaaccaagtgggttggggtgcctgccaagtaaagtcctgccatggctgcacactggacaggatacctgggagtctttgaaatttagaaatgcaggaggcatcacttacattgtgctttgcaaagcattttccaactgttgttttacaggtcagtggaacatttataaggcagatacagacccaggtagggttactgaggaacccagagatacactgtgggtcacacagtggccctgggactcctgattccagtgccaayggagtggctgctaaaccagttgctgctaatagcctgaattatggctgctgttcattgagtgcttgctgccagccaggcatggtgctagatgctctcaggtgttagtgaatcctcacagcagcactgcaaggtgggtgttgttgccgctgctttgtagatgaagaactgagacttacagaacttaccagatgtgcccaaacagacagcaggaggatctggggttgaaactcatgtctttctgatgcacagcccctgctcttagttcctgctccttgatgtgctcaacaaaccttaattgtcctttggggttgtctgcccccaaaagtctgaatttttttttttttgtttttgagatggagtctcgttctgttgccaggctggagtacagtggtgtgatctcggctcactgcaacctctgactcctgggttcaagcgactctcatgcctcagcstcccgagtagctgggattacaggcacgcaccaccacagccagctaatttttgtattgttactagagacggggttttgccatgttggccaggctggtctcgaactcctgacctcgtgatccgcctgcctcggcctcccaaactgctgggactataggtgtgagacactgtgcctggccaagtctgagtctttttgagctgagaactgtgctgagtgttgtggaggagacagtaatgtccaagttgctgttcctgggagggggataagacgagtccaccaatagatctacagtggaaatgtggccagttaaaggaggtcgaagtcatccccatagggagctcagaaaaggcatttgggatgggcctctaagggtaggtttccaagcagtgcctgtgggctggagggggtgtgcaggccaacaggtacaaagaaaggctatcacaaggcacatttagggagttgtcccttttttctagagcataggggatttatttagaaagtagtaaggaatcctatttggttgcaagcagcaacttggctgcctttggcaggaaagcatttccttggaaagctgtgggaactataaaatcagagtgatgactcaggacccaggtcccctccagggtcttggagtgggtgcagcaggaaccaaaggccagtctcttcagggaaccgctgttgccaggatgcatctgctccagctgtgctcactcattttgtcatcactgcttgggattcatatctgagggaggaagtgtctggttggcccagcctgggccgtgttcccttgttcccttccttggccagggaagggctggtggcatgttgggcagttccctcgcaaccctgcatccaaaagcaaaactctccagaaggagagaaaatacacactgcaaaaaatctgtccagacaggtgctggataaggacttgaactgacaggtggtgaagcagggggctttagtctgactagtttctgagcagaccgagggcaaactggcagcagggtatggctgggtcataaggggacagggagaggagggagggaggagatggagaactagatagagtccaattgaggtatgcaggccggcacttggcagtagaagtggaaaagaggggacggagtctagagagcttgcaaaagtagctgtcttcagagcagacactgatgggctggggcttggagtttcagtgcctggtgatgagagctggttcctttactgaaatggggcagtcaggaggaggaagagtttaggagaaggtgatgtggcctcgctttggaggagctgtgtgcttatgctgaccgcacacccggaatcctggtgagcttcctgaggttgggagccttgccctgaggcggtggggccgccgagccccagaggctctctatgtggtggacacagctggggctctctgccagctgggtgcttttgcatctcttctgtttccacatgcagcccgggatgggcttctcctccttccccttctgtgctttcagttcctgtgtcccagcttccgtcccacacacctgagtccttaccaactaaagggcctggccctgctttctgagaccgagttttccttcctctctgctcagagtgcttgttaatgataagtcctcattcagctattagggtagacatctccaagtgacatgtcgcaagaaggggggtctgaactttgcctgctatctgggggaaatcaggctttttcctccagttatgccatgctcatcagggacccctgcctatgtccctaaccagccattttagcgtacttcttgttgctatttataaatcattgttgtagttacaacatattgtcaggcttccatgttgccgttgtggaccttgtagggttccagggcacaggctgggctttgggcaatcctagctttctagctgagccctggtggtttcctgctgcagaaatgggtgggagggagggaacagagttgtcttgggtggaggcaggaggagctatgctgaagggtgccttatccctgcagattcttagagcaggtcatcttcctggagtgaagaggactttccctcaattcaaatatgtttgctgttttaccaactattaatgcagtggatactaccatgtacaataaggtgaacaagggccaaggtaaatctagaggaaaaaatgtaatttttaaaaattttaccaatcatgctaaatggggcctcgctgtgtcacccaggctggaatacagtggtgctgtcatagttcactgcagccttgaactcttgggctcaagtggtccttccacctcagcttcctgagtagctgcagcaactacaggtgtacactactttgtgcccagctaagttaaaaaaaaatatatatatatatattttttttaagacggagtctcgctctgttgcccaggctggagtgcagtggcgccatctcggctcactgcaagctctgcctcctgggttcatgccattctcctgcctcagcctcccgagtagctgggactacaggcacccgccaccacgcctggctaattttcttgtatttttagtagagacggggtttcactgtattagccaggatggtctcgatctcatgacctcgtgatctgcccgcctcggcctcccaaagtgctgggattacagaggtgagccactgcacctggccaatttttttttttttttttaaagagatgggagttttgctgtgtttcccaggctggtcttgaactcctggcttcaagtgatcctcccacctggctaaattttatttgcatgttggtgataattaacacaacacacatagttctggtatcagatgttgaaaacaacccagcttcttctttctgatgctattggtttctaggtgaaggggcccgtcctcctgggaggtggcattgcggggcccaggggcagagaggggaccctgaggtgttgcggcatgacccaaggacctgctctgtcttttctctcttgactgagcagtcctagccctgcgggcaggcagcagccccccagcctcagcaggtcagcagcctttggagggagaaaattggcaacaaatgttaatagctaattggtctacagggaactactttggtgtggaaaaatcaacaagatatttgtgtggctaaagggaacttagagggactagggctgacagtgaagaggggaagatgaggagaggcacacgtcaggagattgccccgccctgccacccccacctctccaccccctgctgcctgcctcccccacgccccctccttcctgtcttctttgcaggcttcctttttgtttgcaagggacattagtagaatatggaatctcccctgccctgtaagtcaggtttccccaacctttgttcctacccaagttcagttaaacacaaagcaccagcgatttgatgcaggcagtgaattggaacctgagtttcarggggaagtgaaagtttctgtgggcctgtgtggagtccctaggctacacaagaaaagatggcagcaaccaaagggaatgaggctgtgtgggaaagtaaagggagaggagagaaccccggcctcctcggttcccacctctcttgggtgctctagggagcagtgtgagtcctgggttcgggttgccagaccacaagggagtttctggggcctggccctctctctgctccttcctgtcccaaagggcttagtatttccctggatccaggcctgtttagtgtttggctggtttctggggcctccagcatggctcaggggagaccccaggtccatgggtaggaggagatggtgaggagaggaatggggatcccattcaggctcccctcgtgaagggggccaacactggtacttccttagacgggaagaggctgtggcatgggaagcaggtcaatagtttgtgtcaaggaggtgcagcccaagatcacagtggtggctgtttgatgaaggattttcctcagtgcctgaaaagcaatttactcttgtccttaaagcaacagtgggtaggcttctagaatgagtgtgagttttcatctcaagtggcagtgcccagctgtctgcatacctcagccccttcagacctggctgaggtattttagagggcattgtcttccacccatgctgccagtcctggcagttcctgcccagcctggatccctgggcataccctgccactaatgctgtgcagacaaagtgaggcctgctggccctctgttggcagcccagaggcccaggtggaggcctgggctggccgagggcccaggagcatcagggcaggtctgtttggctgtcctcaagggaaagcagcttgttattctcagggggcatgagggtgcagctgatwttcacagtctagggcttggtctggttgaatgcatataggattcttgctgccttagctacccacagggttttggtgctgtgtgacccggggcaagtcattacccctctctaagcctgggaggccaaggcgggcagatcacctgaggtcaggagttcaagaccagcctggccaatatggcaaaaccctatctctactaacaatacaaaaaattagccgggtgtggtggagggcgcctgtaatcccagctactggggaggctgaggcaggagaatcacttgaacctgggaggtggaggttacagtgagccgtgatcaccccatttcactccagcctgggcaataagagcgaaactctgtctcaaaaaaaaaaaaaaaaaaaagaatttaaagccctgctcagggattcactcttttttttttttttttttttgagacagagtcttgctctgttgcccaggctggagtgcagtggcgcgatctcggctcactgcaagctccgcctcccgggttcatgccattctcctgcctcagcctgctagctgggactacaggcatctgccactacgcccggctaattttttgtatttttagtagagacggtgtttcaccgtgttagccaggatggtctcgatctcctgacctcgtgatctgcccacctcagcctcccaaagtgctgggattacaggcttgagccaccttacccggcctcagggattcattcttcagccatctggtcaacctgattgacagaagcccgccacagcctgagtggggaggtagtactgggggcccaggaggccatcataagggccagatgtctgtgggaattggcttgaactttctcctaacctgtttggatgcgttaagcagcagccagcctgctctggcatctccctggacaactcaggctcctgcagctgagggggctgtgctcagttcccctgcatccagtagttcctcacccccacttccaactcctgctctgtcctggattcaggcagaaaactccatctggtctctttcctcccttcttactctggccaccatttaggccctggggtgactgttaataggattcccatttttttatttgccaagttctcccccacccttttacatcctgtgctctgctctagccaggtttttccccaaagccagggtgggaggtggaatcagactgatctgggaggcgctgggtcagccgcacagccacgtggcagatctgtgaggagttgagaacccgcttggaaggggctgggtaggatctcactgtagagaagaggaggaaggtagtgaggaaaaggccacacataccaagatacaaaggcctgaactgagaaggcaggggacgtgtggggaccttgagaagtccagtttgagcagagcataaggtttcctggattgtgtccaagagggagggataggatagaggggtctggggagagatgggccccaagccccaccctagcagggaggaaggggcaggctttctggcagcctctggctgtcctgggctggtcacaaagaattgtgcttacaggaagcgggggaggggttgttaatggcagtttgttcacaggctgcaaggctgccaaaggtcagtctgataagagggaagagatagactccttgagttttgtaatcccagatagctgccttctcttagctggccccacagatactgacagttgagttggtgctgctgccgctctgtcacctcctcctgaaatacacagcccctggcttcggcccagctgggtttcccctgcctggccaccagctccctttcccatctgcggtcagctgtgcactgggggaggggacaaacctggcaagactgagctcattctgagcctgactcaggagtttgaagcctccccaggagtggtgccagggctgtggacagagcagtgacttccagacctttccgttccattttggtgtcagggttatcctgcagcccagccagccagacctggggcctttggggagttccgcctttaccccagagcattgggaggtctggctgttgtgatgagaggaattagagatggggatctaatgagatttgcttatgtgaagaccactttggctaccctatgaagaaggagttgaagggggtccgtttagtagatctggggcttaagtggttaggactgctggaggtgaagaatgacatttccttggatggagtgatggttgtagacagagcgagaaatagatctgagagacatttcagtggtaaaaattagttgagatttgtaatagattggctgtgagaggttgaggaaggagggctcacatatgactcttacatttcaggcttagatggatgggggttcctttcccagaaattgggaatacagaaagaatactgggtttggccaggcgcagtggctcacgcctgtaatcccagcactttgggaggctgaggcgggcggatcacgaggtcaggagatcgagaccatcctggctaacacggtgaaaccccatctctactaaaaatacaaaaattagccaggcatggtggcgggggcctgtagtcccagctacttgggaggctgaggcaggagaatggcttgaacccaggaggtggaggttgcagtgagccgagatcgcaccactgcactccagcctgggcgacagagtgagattcagtctcaaaaaaaaaaaaaaaaaagaagactgggtttgaggggcttgaggggcttggattatgcatgggtttggtttggggcaagttgagtttgagatactttttggatacctctactaaggtatactgtctaaaggatagcatccagaaattagtgggatagatgggtctggtgttcaggggcgtgactgtcaccatttgaaaagccagagatgctcaggtatggtggcttgtgtctgtaatctcagcactttgggatgctgaggtaagaggattgcctaagcccaggagttcgagaccagcctgggaaacatagggagaccatgtcggtaaaaagtattttaaaaagtagctgggaatggtggtacatacctgtggtcccggctactcgggaggctgaggtgggaggattgctggagcctgggaggtcaagactgcagtgaaccatttttgcgccactgcactccagcctgagcgacagagcgagaccctttgtcaaaaaagaaagagagaaaatccagagataattcttaaaggttgaaatacacttttgggccaggcgcggtggctcacgcctataattccaacactttgggaggccgaggtgggtggatcacctgaggttgggagttcaagaccagcctgaccaacatggagaaaccccgtctctactaaaaatacaaaattagccgggatggtggtgcatgcctgtaatcccagctactcaggaggctgaggcaggagaatcgcttgaacccgggaggcagaggttgtggtgagccgagattgcgccattgcactccagtctaggcaacaagagtgaaactctgtctcaaaaaaaaaaaaagaaaaacacttctgagggccgggtgtggtggctcacacctgtaatcccagcactttgggaggccgaggcaggcggattgcctgaggtcaggagttcaagaccagcctggccaatctggtgaaaccccgtgtctacgaaaaatataaagaattagctgggtgtggtggcattcacctcacctgtggtcccagctactcgggaggctgaggcaggagaatcgcttgaacctgggaggcggaggttgcagtgagccgagatcgcgccactgcactccagcctgggcgacagagtgagattcagtctcaaaaacaaaaaaaaaaaaaaaaaaaaaaaaggctttggcccccataatgcattgcaagatgagcaatggaacgtaggatcctaacttcctgttacgttctatattgacggtcatgttcttttttcctgaggacttcagctggttcaaggtatggctagacagcaaaaggcatggcaycctcccctgctgaggcttccctgtggttgggggactctgatggtgggcagtgtttactccaggccaccccagaaggccatgcagtcagggcctccctcaccatccgcacgtctgggcagttccctggctggagaaggacttcagtcctggccagaattgagccactgccaggaatccctgaacgtcagtacccggaccacttctgcccttgtgggcctctgagctgggtcgatttatcaagggtagggattttagaggcaggttcagggcagcccttctgcatcagatgtcaagtaagtagtttttttttttgagacagagtttcgctcttgttacccacccaggctggagtgaatggagcggtctcggttcactgcagcttccacctctcgggttcaagcgattctcctgtgtcagcttcccgagtagctggattaccattttacattctaacgttcaatttttaacaaggtaaattawcaaatggcagtagaactatggcaaagcatggtctccatgggtcaaaatggtacctggcactacctcaatatatcactgktttttttttgtcctgagacggagtctcactctgtcacccaggctggagtgcagtggcacgatctcagctcactgcaacctctgcctcctgggttcaagcaattctcctgcctcagcctcctgagtagctggaactacaggcgcacatcaccacgcccagctaatttttgtatctttatcagagacaggctttcaccatggtgaccaggctgatcttgaactcctgacctcaggtgatctgtccacctcggcctcctaaagtgctggaattacagacgtgagctgctgcgcctggcctatcactttttttttatgttgcccaggctgtacttgaactcttgggttcaagcaatccttccacctcagcttcctaagcagtggggactacaggcgtgcatcaccatgcccagctcaatacaagacatctttatcattaacaacaggtctttggggaaccatctctccccagctgccatctctgtgccctgtaacccaggcttggccaataagggcaccaaatgcacccagccacagtgcctggtccaggtttggacacagactccatatcagagtgaacccaggactccagcaggcatcttgaaaagagatgctgagacgaaggaggcctgtgccacgagcaggcaccttccatcatgtgggaaccaagagtggcatcattttccctgcatgtggccagtcatacccacaggcatctgagttaaaggtttcccttacatcaaagggcacttcaaattggatttttagccactgtaattaaagaagttcaaatgatacagtcttacaccatgtgcaaccattttccatttcattggcaagaactttattatttatttatttatttatttaatttttttgagacagagttttgctcttattgtcccaggctggagtgccatggcacatactcggctcaccgcgacctccaccgcccgggttcaagcannnnnnnnnnnnnnnnnnnnnnnnnnnnnnnnnnnnnnnnnnnnnnnnnnnnnnnnnnnnnnnnnnnnnnnnnnnnnnnnnnnnnnnnnnnnnnnnnnnnnnnnnnnnnnnnnnnnnnnnnnnnnnnnnnnnnnnnnnnnnnnnnnnnnnnnnnnnnnnnnnnnnnnnnnnnnnnnnnnnnnnnnnnnnnnnnnnnnnnnnnnnnnccaacatggagaaaccccgtctctactaaaagtacaaaaaaaaaaaaattagctgggcgtcatggcgcatgcctgtgatcccagctactcaggaggctgaggcaggagaatggctttttttgttttgttttgttttgtttttttgagacgaagtctcactctgtcacccaggctggagtgcagtggcacgatcttggctcactgccagctctgcctcccgagttcatgccattttcccgcctcagcctcctgagtagctgggactacaggcgcttgccaccacgcccggctaattttttgtacttttagtagagacggggtttcactgtggtctctgtctcctgacctcgtgatctgcccgcctcagcctcctaaagtgctgggattacaagcgtgagccactgcacccggccaggagaatcgctttaacccaggaggtggaggttgtggtgagccgagatcacaccattgcactccagcctgggcaaaaagagcgaaactccatctcaaaaaaaaaaaaaaaaaaatcattgagtcattccatttacagatcaggaagtggaagttgagaaatttgcccaagatccccaagccaggaggtagaagaactgaggcaagaacccaggttgtctgaattgcaggcagggggctttttccagtatggagtactgacttttttgtttgtttgttttgagatggagtctttctctgtcacccaggttggagtgcagtaacttggtcttggctcattgcagcctccgcctcccaggttcaagcgattcccctgcctcagcctccccagtagcagggatgacaggcatgtgccaccacgcccagctaattttttgtatttttagtagagacgggatttcaccatgttggccaggctggattcaaactcctgacctcaggtgatcttccggacgcagcctcccaaagtgctgggattacaggcgtgagccaccgcgcccagcctaaagtgttgatttttatggcaaatggtcccttcctcttaatggcccggggggagatctgtgtgatagctggtgttaggaaaggtctgagatggagacattcagtgacgtcagcttcctgaatgcccaccctcctgtgctgtttcttgctggcactgggatgaggacatggctctggtgtggctgtgttttctcaattctgttgagggatttggggtgagtcgtgctccccctctgtctcctcctttggaagagaatgcccaggacagtggtgccagtttcaggtacagaaaaacaaaaatagcgctcttttggactcagttctctgtcacttccagtttgtgaggggacaggtatttgactcagcttggcaaagccaggaatggagtgttgtagtaagagcttagcagcgtgctttgggctttgagcctctgacttaagaggagacctcagttcagtcttacacaggcttcttacctcaggtgagtcactttgctggggtctctgggccagaggtcaaggctgcccctatgagggctttggactctgagggtgtggcgttatgtgtgtattagcaaaatgctggtgtgcctgggagctttggggcaatgctcaccagctcctgagttctcgggagtgaagtttgggactggatgcctcttgcattctgagcctctcactcctgtgtctttcctcttgcccttcagatgtttgctgacagccatttctctcccgaactgtctgccagcccagactgacctgtctgcttctcctgctcagcgcccagagcaccctgtctgtttatgcctggggccggttttaactggtcccccagtcccatgtcacacacacctgttccctttggcttagctgcagtgtcacctctcgtccctgtttccttcctctctatgaggctgaaagtcaatgttacttggagatacagcactccacagcctacagtcattgctcatttaatctttgcagggagtgcgtgaggtcagtaggtaggcattatcgtgctcattttacaaatggaggacctgcagcccagagaggtgtgatttgcccaaagacacacagctgctctgctattgagcacagccagtcctggaatcaaggtcctccagcattggtccatcattccctgtgaaatgttagtgcaggctgggcttggtggctcaggcccgtaattccagcactttcgggggctgagacgggaggattggggtcaggagttcaagaccagcctgggcagcatagcaagatcctagctttacaaaaacaaacaataacaacaaacaaaatggtaattcataggcatgagttaaccacatatggggtggggatgccctagcctcacaatggccctatgagggctttggactctgaaagcgaagtcaggtgcggtgttgtgtgtacctgtggtcccagctgctcaggatgctgaggctgaggcaggaggccaagactgcagtgagccatgatcctagcactgcactccagcctgggctggagtaagaccttgtctcaaggaggggtggggcttgaaagcgggccctgggccccacctcctcacatccccagtccctgatagcaccatcatgtgggcgatgcctgtgtaaccccaagctgtatcataaagctggacaacaaagacagctccctggggtccactgtaatggaccaaggtctgtgcgtccttcctttccacatccccctaaagttgacaacagtagtacatggcacgatggatgttgtcttggcagggagcttataactcagcttaggccagatccaggagggcaggtcagtccttgaggatgggcagcagggaccgaggagggcccttggcgtcccccaaccttcgtttttctcaccccggggataaggctcagaggcggtgccagggaaaggcccactttgggcctactcacagcagcgatattgccactttccagaggtggtgaactgattccctagcaaccaggggccctgcctgagtaggtcacagcatgtcatcggctcctcaggaaagaggaagactgctcagctggagctcgggaccatgaaggcaggtgtgtgctgggctctcaggcactgtcctccccagcccacctcccagggctgaaccttagtgacagggaaaagcagggtgcaggacagcgatgcttcccaaagccacctgcagggttggtgctggaagttaccagatggcaccaggctggccgtgggctcacaatgacctctcttcctagctggaacttccagggtccctgttggaaaggaagtgtccagaggacacagcagctgagcaaggggcccacctctggttccctccatcttttactctgcatttctataccttcactctggagggctgggtgggaggacatggcttccttttagtcttctggtagaagcatggatgcaaacaccttccttgagtttccatgagcatagctgccacaggctgacctttccaaaagacattactaaatataaaaggagaacaaaagaaagctaaagatagggcgtgcaaagaataaaaacagcctggctcacaaagaacaagttactggtttgtttccaaagctttcggaccctgccctgttattccccttccaggagataaccacctccaaggccagcagacgtctgcaggccctttcgccaggctctctggcctcctagtgctggcttgtccactgtctaggttgtcttgtaggacccatgccaccaggaatcctctccagactacttgaccaccctgcagtcagatctctgttctgccctcttctctacccagggctcttggctgtggtggcggagggagggatgcctgtttccctaggtctcccaggtgattggcacctatgtgactggaccttttaggagtgcagccttgttccatgtaggccttgtaatatgacctacctcttgccatgctgctcaggccagtttagcccacgaactgccatacaaaaggctttctccaacatttgatcttggcagaaactatagaagtctccccacctggttccatcctcccactgggccacaagaatagaaactgataagaagttggcctagttgatggaagtttgaacccggggacagaggttgcagtgaaccgagatcatgccatttcactctagcttgggtgaaagagcaaaacttcatctcaaaaaaaaaaaaaaaaaaaagggaaggggggggtcaaatggtcagttgtggtgtccctaccccactgataacataggagccctttggagggatttgcctggtacaaagtaggcctccatacctgcagcctggactgttgctgtcatcatattgcctggccccagtggttctggcggacaccccaccttggtagcttggctgggcaggaggactgaaagattacaggcagaggtcataccagcccggtggaggaggcgaggtccatgactggggctgatgatgagaaagaaccatgttttcacctgtacctttgagtgtgatgccagcactagcgaggcgagcgagctgctctgacctctggccgccaggctgggacagggaagcctctgagacccgaggctgctgcacccagggcctcatgtcccagaagctctcacagcattctcaggggcttagcttgtcttgtgtgttggagctttgggctgagcctgtttcagtatgccagccaggtcactgtgccgctgccctctggtttgcagagggcctttgtgcctatgcagtgactccacagactgtcttgcagctttcctttccactgaagcagtcacttcccctgctgccggggcccctgtcttatggatttgcagtgctcgtggttggattgtgacctctttcctggtattctctcccctattctcacatccctaacaggatctggggatagatggtggatttttaagtccagtccttcaactctgggccgcaaagactgtggcctgaagttctggagcatatctcctctttcctttggtatgcatgggtgggacttgcaggcaccctagcttagccccttgccatcagcccctgctggggtctagcaggcctgagccttttccagggtggccagcctgctggagcttacagtgggggagggtaggacccagaccagagtccctcgccatggtccagccttgatgttgacatccaagagttgggagagggggagggaatgccctgccctccctgccactttgtgcgactcgcccgggttgggccctttaggagagcatttgtgtccctgccctggagtctcctcttcctgctgtgtgcccttgctcggggttgttccaggaagcctctggtgtggggggctctgttgccaccagctgatttcctgccccaggtgcgtgggtgggggaggagagggttgaagattacctggagaaatcgcccgctttgcttccgtttcacccctcttctagggaggacagcagagtgcacagaggttctcttctaatcctctcacccccaacctggtcctccacaaccaggctagagcgtatctatgtatctggggaagccagggcttggggaggagtggactgacccgtgttctgtgaaggtcaaggagggcccacttcgatgaggatgagtttggcagggagcgtggtcctgctcgccgagcggggctgtaagtggaggactgcacctgccttttcctccttgaagccccagctctggcctcagcagtagtgccctgctggtggttagtattcctgtcaccagctccgcctccttacagagggaaaagcctccagttgggaccctgggatgccagtctctgaggtcagctgcccctgatacctttggaagggacagccctcctggaggaaggatagctgtcaaagccaaggagccctgactttgtggtaggctggagggcttgcaggaagtcctcaaaacagaggagccccattgctgtgctccttgacagagcaggaagctggcctgattgtttccagagaggacccaccaggccgtaggaaaaagggcttggctaaggggtcagtgagggctcttcccagtctggctgccactgcctggtgtcgatcaataactgtgcagaacacacgcatcttgtgtttttctcttgtgattcaaagcattctccagacatgcagacgagtacagaaggaaaaagaggaccctgacagctcctcagtggctccttattatacatctacggtgtgaccaagatcagaatcataagcagtgatgagcagccaagctacctggcattctgaatcctatctttaaaagaaatcagagcggactgtcagcaccttagtcccttcaccccgggaggtagtgtggtccagtttaatggccccctggaggcagtcagagggcagcgttgggagatgaacttctaacattccccccgcccccccagccacgccatgccaccccatacactccagaccctctctggcttcccctggtccaccgtttattcatcccacttcccacttcctccagaagtctcccctggagacttgggttcatccccctctctcctaccttcagggtctgcaactcatcttctgcctctattaatgtctgaggcttttggccttgcagagaaactccttattataatagctttgtattctagaatcttgctcctggcttgtggctgtctggcctccagcctcagggagctgtttagagccagctcaggtcaggcctctgctctgcagggtgtgctaaagtgggggctggggaaggggttacggccgtgtcccataggatggacgcgcaccgtcctctgctgggtctaggggcaaggatcaaccaaggtagggctggccctgaaaccgcaaccttcctggaggccggtgcctgctgggagtggggccccagggaggagagttcctgtgggaagtgggggctgggaaggtggggtggggctggggcgctgtggagccagagtcagtgctgtgtgggaggggtttgtgccttccttgtgatgccatggggctcctgcagagctgtgaccctcaatctgcccaacccatgaccatagccatggaggtagagctttatgtgtgcctttatataatcctcatggaaccccttcgagatgggtgctattcccattgcacagatcaggaccatgagagaagttacatggtcaatagctgacaagtggcaaacccacaatgtgaatccaagtttttctacgcactttgttcatctggagatgctttgagccgaggtgaacgggtgagtgatctggaaagccccagctgggaggactgcagcttgcggtgcttaggggagtgagctgcaggagttccaggtcagcagccgtgccaggtgtttgttgctgggcccttaagagtagcacactcccactgtccctgccrtcgtccaggcacctgcttcagctttacacgcacacccctttcccacaggctcagatttgctcaatttggtttgtacctgaggtctcatgtttctgggtggtccaagagaagttagagaaagctctcacttctagaatgtcagagatggaaaagtgggggcagaatataattatcactttcatatgcatacttatataattcataataatggtttcaaagcattttttataaccatcatttcttttgatttttatagccctgggcttatgtagagagatgatactcagttgggcaaacatttattgatgcctcctatatgcaggacagtgctaggcgctacagtggtacagagatgaggaattaaatagcattgtctctgtaccctgagagttcttagggttcttttaagtgagagacacatacatgtctttttagtttcagtgtagaatcttaataaatgtgggccagttctggcttgggatccaaattagtttgtaaaccttagagaatagggtctgataagagatgaggctggggaggcctggtttgggcatctctgaatgctatttatgttaagatcttgacctcgctgcatgaataagggcaccccatctcatgcttttgaaatacattagcagctgaaagaaataggtaaaactggaaatcacagtggtggtcagcagtaaccaacactgcgatcatccgggaggaagagagtggaggtaggattgcttccttttgattgttaaagaatcttggaagctgggctcggtggctcactcctgtaatcacagcactttgggaggccgaggtgggtggatcacttgaagtcaggaattgaagaccagcctaggcaacatggtgaaaccccatctctactaaaaatacaaaaattagctgggcgtggtggcgcgtgcctgtagtcccagctactcaggaggctgaggcaggagaatcgcttgaacccgggaggcggaggttgcggtgagccaagatcccaagattgtgccactgcactccaggctgggtgactgagactctgtttcagaaaagaaaaaaaaaaaaaaaaaaaagaatcttggaagctgggcacggtggatcaacgcctgtaatcctagcactttgggaggccgaggtgggtagatcacttgaagtcaggaatttgagaccagcctagccaacatggtgaaaccccatctctactaaaaatagaaaagttagccaggtgtggtggcacactccggtagtcccagctactcaggaggctgaggcaggagaatcgcttgaacccgggagatggagagagagagaaacaccctggggttgtttgtccgttaactttacgaatatcttctcctgactggcttgcaatatattatcttgtgaaaataggaatttacaagagggtgtatccctcttaggtttatccgtttcttgtgaccttccccgtgccgcccggagggctgtaatctagtaagtttgatgacttgctgtggtgcctagataagggttcaggaatgcagctgcagagtattcacggtaagggtcagctgcattgtggcgggggggtggtcctggggcagctcatccctaacagtcaggagtttgagaccagcctgaccaacatggcgaaagcccatctctgctaataatagaaaaattggctgggcgtgatggctcatgcctgtaatcccagcactttgggaggccgaggcaggtggatcacgaggtaaggagatcgagaccatcctggctaacacggtgaaaccccgtctctactaaaaaatacaaaaagttagccaggtttggtggcggacgcctgtagtcccagatactcgggaggctgacgcaggagaatggcatgaacccgggaggtggagcttgcagtgagccgagatcgtgccactgcactccagcctgggtgacagagtgagactccgtctcaaaaaaataaataaataataaataaataaataaataaataataatagaaaaattatctgggcgtggtggcaggcgcctgtagtcccagctacttgggaggctgagtcaggagtatcacttgaacccaggaggcggaggttgcagtgagctgagatcacactaccgcactacagcctggatgacagagtgagactctatctcaaaaataaacaaacagaatcttggcctggaaatgaaaagtaacctgcttggctgcttggtaacagtctagactagaatttggctcctgaatcaattgttccgattttcagtggaacttcaggctgggcctgtgctggcagactggggacttgaagagagtcagatgggccttccatcaggggtgtttgtatggccagtgtgcagttttcactagtcaggtgaaagactgaaatgggcaaatggtgtggaagagactgaaggcccgtgttacctgggtcagtgaaggcctgcccaggccacatctgaaagatcccgtttgcatgtctgcacgccctgccctatccctctgtggactggaatgaaggtggcagtgggaatgggagagcagtttcaattgggcctttcttcagttgaccccagggtatctcagtctcctgccctcattgtgttggctagagttctatgaatcttgttagagatggtttgatacctgttcccaagagattagtattggcagggatgcccagtttcctggtatgaatagttaaatccaattcatccagtcaggatggcactgtaaatttatactctaaacacatagcagtaatacataaaaagataaaattctaaaaatatattcatgtacgcctccacttttctaccccccaccacactcaacatgataaatatccctgtggatgagaaatagacaagaacacaaggaagaaagccaggctgaagctgcaggcctgctggtctctgagtctggaagcagaaatttgggataacagagccataaagtgttccatttggagcatggaattgagctaggaaattgcttgaatccacagctggacagtagcctgagaaaagttgttaccatttcctggggctaaagcttttatttatttatttatttatttatttatttatttatttattattttcttttttgagatggagtttcgcttttgttgcccaggctggagtgcaatggcatgatctctactcactgcaacctccgcttcctgggctcaagcaattctcctgcctcagcctccggagtagctgggatcacaggcatgcgcaaccacgcctggctaattttttttttttttttttttttttttgtatttttgatagagacgggtttctccatgttggtcaggctggtctcgaactcctgacctcaggtgatctggctgcttcggcctcccaaagtgctgggattataggcgcgagccaccgcgcccggccagctttttattttttatagagacagagtctcactctgttgcccaggctggtgtgcagtggcatgatcatggctcaatgcagccttgacttccctggttcaaatgatcctgccccctcagcttcccgagtagctagggctgtaggcacttgccaccatgcccagctaactttttttttttttttgagacagagtttcactcttgttgcccaggctggagtgcagtggcccgatcttagctcactgcaacctccgccttccaggttcaagtgagtctcctgtctcagcctcccgagtagctaggattacaggcatccgccaccatgcccggcttattttttgtattattagtagatacggggtttcaccatgttggccaggctggtcgtgaactcctgacctcagctgatccacctgcctccgcctcccaaagtactgggattacaggtgtgtgccaccrtgcccagcctcaagccaacctttcgccttagcgtcttgactttctgggaccacaggcatgcgctaccacgcttaatttttttattttttattatagagacgcggttttgccatgttgcctaagctggtctcgaactcctgagctcaagtgatccgcctgcttaggcctccaaaaatgctgggattacaggtatgagccaccatgcccagcctagaaataatatttaaagagataatggcttgaaatttcagattcgaaaaaacagcatgaacatcaaacaggataaataatatgtcactagatataatacagccaaactgcagataataatataactttattttgctttttgaggccaggttgggcggcagtggcgtaatcacggttcactgtggccttgacctgccaggctcaggtgatcctcccacctcagcctcctgagtagctgggcctacagaaacatgccaccacgcccggctaatttttgtattttttgtagagatagggtgttgtcgtgttgcccaggttggtctcaaactcctgggctcaagcaacctgcccaccgtggtctcccaaagtgctgggattacaggcatgagctgccatacctgaccagaccaagagagttaaaaactactggaggtaagaaagaattcaaagaattgacaattagatcacaaataatatcttatcaacattggatgccagaaaacaacagaagaatgtcttagagaagctccttgtcaacctggaattccatagccagctatcattcaagaatgaggtaaaataaaggtatttttggacaggctaagacagttttatcacctacagacctttgctgaaagaatggttacagatgtacttcagtaagaagaaaagtaaacccctgaagaaagagcaggttgttggtgccaacagtgagcacagaagtggatgcattatgttggtaaattgaattaactatttttttttttttttgagacggagtttcgctcttgttgcccaggctggagtgcaatggggtgatctcggctcaccgcaacctctgcctcccgggttcaagcgattctcccacctcaccctcctgagtagctgggattacagacatccgccaccacacccagctaattttgtattttcagtagagacrgggtttctccatgttggtcaggctgctctcgaactcccaacctcaggtgatccgcctgcctcagcctcctgaagtgctgggattacaggtgtgagccaccgtgcctggcctgaattaactattaacaatatattaggatgcaagtagcagagtaacccacaatgacttaaactggaaaacactggattagtttataacaagaagtgtggaggtcagtagttccagggttggggcagtaggtcacataggaacatgaaggaccctcgatctttctactctgccatacgagggtgcaagatgtctctcatggtcgtgagatggctgccatagctccagacattatatcatcaccctgtaacatcccaggcaggaaggcacagagatcctaggagaaaggaagctttttcttcatgtgctgctgctgctttttttttttttattttttattgcaatcactgtcatccaggctggaaggtgtgatctccgctccgcccacttcaacttccacctcgtgggttcaagtgattcttgtgccttagcctcctgagtagctggaaatacaagcacttgaccccacgcccagctaatttttgtatttttagtagagatggggtttcaccatgttgcccaggctggtctcgaactcctgacctcaggtgatctgcctgcctcagtctcccaaagcgctgggattacagttgtgagccactgcgcccggctgcttatttggaaaggaaaatctttccaagatggccctaacacatactcccttgggtctcattgacctgagctggtccatcctcaaaccaattcctggtgaaaaagggacaggcttgctgtggttggcgctggttggctttggccagtcttgcatcatctgccaggactgggtccttagctgcccaaacaaatcaggattctgttggcaagcgaaaaagagagtggccgctggtagacagccaacagtgtctgctacagacggcaaaacacagagacaaaaaaaaaaaaaaaaaacaggatctaaatgggcttttaatttttttttttaagagaaaactagaattgttgaccacattaccaaggaagaataagaatagagaattttattgttaagccacaccaaatttctgccttgttaagagaatggcattactgaaaaactgaagacttcatcaagaaaatgtacataagctaacaatataagattaatcactaaaaaaaaagtaatataatttccagaccaggagggggaaaaaaagtggtgagggttggccgggcgtgttggctctcgcctgtaatcccagcactttgggaggccgacgcaggcagatcacgaggtcaggagatcaagaccatcctggctaacatggtgaagccctgtctctactaaaaatacaaaaaaaaattagccgggcatggtggtgggcacctgtggtcccagctacgggggaggctgaggcaggagaatggcataaacctgggaggcagagcttgcagtgagccgagatcaagccactgcactccagcctgggtgacagggtgagactccgtctcaaaaaaaaaaaaaaaaaaaaaaaaaaaaggtgagggtggagataatatgtcaacccaagtcaggaaaagaaaaaaaatacagaaaaaatagtagacaaaatactgaataagatagtaacataactccaagtgaaatggattaaactcatctatttgaaaacaacaacagcatcaggtgaaataaaaagcaaagaagtctgaggactgagcaaggtggctcatatctgcaatctcagctctttgggaggccacgttgggaggatcatttgagaacaggagttggagatcagcctgggcaacatagcaagacatcatctctacaacaacaaaaaaaacaacaaaagtagtgcacacctgtagtcccagctacttgggaggctgaggcaggagtctgagagttcaagtccagcctggggaacatagcaagaccctgtctttatgaaaaaaaaaaaaaaaaaaaaaatttagccaggtctggtggcgtatgcctatggtcctagctactcgggggcctgaggtaggatcatttgagcccaggtggtcgagtctacagtcaactgtgattgcgccaccggcattccagtctgggcagcagagtgagatcctgtctcaaaaagggggaaaaagcctgggcgcagtggctgacacctgtaatcccaacactttgggaggcggaggtgggcggaacacctgaggctgggagttcgagaccagcctggccaacacggttaaaccccatctcgactaaaaatacaaaattagccaggcatggtggcgcatgcctgtaatcccagctactcaggagaccgaggcaggaaaattgcttgaacctgggaagtggaggttgcggtgagccaagatcacgccattgtactccagtctgggcaataagagcaaaactccgtctcaaaaaaaaaaagccgccagaggcgggaagctagctagaatgtggagagacctggtcttccccacacaggtggtttgaacttttttcataaaatagagatgaggtctcactctgttgcccaggctccaacccctggactgaagcgatcatccagcctcagtctcccaaagtgctgggattataggtgtgagccaccacaaccagccgagaactgtttttctagacgttacttcatgccttagtgtagataggtacagcaagatactggatttccccctgcccactccgactcaaaacacagtggggctccctcctgaggtagcaggtggtggatctgaagggacccttcaccccaactcccctgccgcaccctctccccgtgcctcagggcccagcttcctcctcttagaggccgtttctttattttttctttcttttttttttttttttttttttttttttttttttttgtttctttgagctgtctcctacaggaagaggctgttagggtgcagcctcgatctttgtccagagaagactgacagtttatttctctaggacttcattgaaagccaaagttatgctcttggtttgaagaagtgtgttagctcttgccttctgggtttctggctacaaactctgggcggcatcaagaggtaccagagctgagatttcagatggatataaagtcaaagttggatgtcctgcaggaagggaggggctgcccgagggtttggtgctgcggagtggaaagggcctgagtccctagggtagcactgaggggtctgtgccagaggctgataccagggtgttgcagtgcgggtgacttcagttaaccaagcagggtggtgaagcrgcccattctcagacaggtcaaggacaggcctcgctgcttttgagttgttggggagggaggggctttcggtaactggccacctgcgcccacccccacccctccgccccagctccttctgcctggtttgggtgctgccccccacccaggaggcagggagtgttctgggttgctaggctggcagggatctggggcacagcgaatgttttgatggttgtaccccagttagtggaagagtgctttgggaaggcagtgggggctgtggaaggagctctgggcttgaagtcatcagacctggcatggcgttaaagcatcttcacttccgcctggctgaccttgttcagctggtcctgggactcctgcgcatactaaatgagaggctatcccccgaaaatgctcagaggttcataaagcatcggtccattggagcagtaggctgtggcttcatgcctttagaatgagctttgggacacgtcctcaggctgtgtgtaagtgggtggagaggggctttatctttcgtctttctcctctccctcccagaggcaagcagcacccatccccccaggctccgtgccttattttgacgtttcttttctctgcatgccaagaaggttgtattcagctgtgctggtctgaggtggtgcttatcctgtgcttcattaggttaagtcgttgatggctgtctcctgggatctgaccgagaattggctctaaagctgctacagcctccaaaacagtccctgctgttctcgttttggggcactctttgctttgctcctcaatcaggtgcttttgttttttccttccatttacctgcgtgctggtgagggtctcctttgaggttccttgtactgggaggtggaagtagcccttcggctgcatctcctgaggatggaaggcggggtcttcaaggcccttgctgcccctgacctctggatcctggctgccagttcctctggacagcctcagcaacttggacatggaccagccattcaggggacatttattgataaatggtctccccaaatttgccaaatttgtgaccacaaacttcttagaagactgtagtattggcacagtggctcacacctgtaattccagcacctggggaggccgaggcaggcggatcacttgaggtcaggagtttgagaccagcctagccaacatggcgaaacctcatctctgttgaaaatacaaaaattagctgggcgtggtggcacgggcctatagtgccagctgcttgggaggctggggcaggagaattgcttgaacccaggaggtggaggttgcagtgagccaatattgcgccactgcactccagcctgggcaaccgagtgagactccataaaaaaaaaaaaaaaggccatagtgttgtcttgccacctcctaaatttccctagttactccctttctcttttagaagactatttcacatctggtctctctgtaaatctccaaccccaacaataaagggacactcctcactgtctgtgccgcttgctcggctttgccacctgtcccacaggtagcccccctccaggacgacactcgatgccatcatctcgtgctgctcccggcctttgttcctctgttcacttctttttcctggatcataaatttcccctctaataattcattcccatcagtgtacacacattctagaccatctctcagctgaatcccattccacattccactctcttacatcccattccttttttttttttgagacagagtctcactctgtcacccaggctggagtgcggtggcacgatcttggctcaccgcaacctccacctcccaggttcaagcgagtctcctgcctcagcctccgaagtagcgggattacaggcgcatgccaccacacccagctaatttttgtatttttagtagagatggggttttgccatgttggccaagctggtctcaaactcctaacctcaggagatccgccaccctcggcatcccaaagtgctgggatcacagctgtgagccactgtgcctggccccccactccagcccaggctggagtgcagtggcataatctcggctcattgcaacctccacctcctgggttcaagcatttctcctgcctcagcctccctagtagctgggactacaggtgcctctgccaccaccccccggctaatttttgttatttttagtagagatggggtttcaccatgttggccctgccaccacccacagctaagttttgttatttttagtagagatggggtttcaccatgttggccaggccgatcttgaactcctgaccccaggtgatctgcccacctcggcctgccagagtgctgggattacaggggtgagccaccacgcccagcaccattctctctttttgttgtaacacctttattgagctataattcacacaccatgcagttcatctctttgaaacatacaagtcagtggctttttttttttttgagacggagtcctgctctgttgcccaggccggagtgcagtggcatgatctcggctcactgcaagctctgcctcccgggttcacgccattctcctgcctcagcctccygagtagctgggaccacaggcgcccgccaccatgcctggctaatttttttgtgtttttagtagagacggggtttcaccatgttagccaggatggtcttgatctcctgacctcgtgatccacctgcctcggcctcccaaagtgctgggattacaggcgtgagccaccgcgcctggctgtcagtggcttttaacctattcaccacaaacaattttggaacatcaccccagaagaaaactccaacccactggcagtcattccccattcttctctatcctccassccctggcaactggtaatctactgtctgtctctatggatttgcctattctgtacattttacataaatcatctggcatggggccttttgtgccttattcctttttttccttttttttttttttttttttttttttaagacggagtctcactgtgtcacccaggctggagtgcagtggcgcaatctcggctcactgcaagctccgcctcccgggttcatgccattctcctgcctcagccttccgagtatctggtactacaggctcccgccaccatgcccggctaattttttgtgtttttagtagagatggggtttcaccatgttaaccaggatggtctcgatctcctgacctcgtgatccgtctgcctcggcctcccaaagtgctgggattacaggcgtgagccaccgcaccaggctgtgcctggctcctttcacttagcacagggttttcaagttcatccatgctgtagcagtgccagaacttgattcctttttatatctgaataatactcccttgtatggatataccacattttgtttatttatgtattggttgatggaactttgagttgtttccatgttggcactcttatgaataatgctgctataaatcatttgtgtatgaggtgttttttttttttttttgagatggagtctcactctgtcgccaggctggagtgcagtggtgcgatctcggctcactgcaacctctgcctcccaagttcaagcgattctcctgcctcagcctcctgagtagctgggactacaggcgcacgccagccatgcccagctaatttttgtatttttaacagagatggggtttcaccaagttggccagatggtcttgatctcttgacctcgtgatctgcccatcttggcctcccaaagtgctgggattacaggtgtgagccaccgtgcccggccatgtgtacaagtttttatgtgaacctaagttttcatttctcttgagtatatacctagaagtggaattgctgagtcatatattatggtgactgtatatttaatcttttgaggaactgccagactgttgcccaaagcgactgcaccatttcacattcccaatagcaaagtctgagggttccaatgtctctgcgtcctcactaacactggttattatctgtcttgttggttacagccaccctgatgggcaggaagtggtatctgattgtggttttgatttgcatttccctgatgattaatgacgttgagcatcttttcctgtgcttgagcctcgcaatacccctggatcagtcattgtgaaggtcaccactgccctccatccagtggtcagttctcagtcctcgccttactttttcaaacacttgacactgttaattcctccttcattctcgaaactttcttctcttggcttcccagatgcagggctgtttttccccctgcctcattggctgtttctttcctggcttctctttcagacagcagagtaccccaggctttgtcctgagccgcctactcttgtctgtggtagaccctccctagatcttttcttctggtcctgtagttttaagaatgaactgtactctgatgactctcagatatatccctctaactctgacctcacccatgagcttcaaacaggtgtgttcaactgcctgtttccaactgcatgtggatgtctaaaaaactttcttttttttttcgagttgtggtatcactctgtcacccatcctggagtgccatggcatgatcacggctcactgcaaccttgaactcctgggctcaagtgatccttatgcctaagcctcctgagtaggtaggactgactacaggcacctgccaccatgcccagctaatgtttttacttttttgtttgtttgtttgcttgagacagtgtctcactctgtcaccaggctggagtgctgtggtgcaatctcagctcacacaacctctgactccctggttcaagcaattctcctgcctcagcctcccgagtagctgggattacaggcacccaccaccacgcccagctaatattttgtatttttagtagagatggggtttcgccatgttggccaggaaggtctcaatctcccgacctcatgatccgcccgcctcggcctcccaaagtgttgggattacaggcatgagccttcatgcccaacgtttttacttttttgtggagatggggtcttgctgtgttgcccaggctggtctcaaactcctgacctcaagtgatcctcccgccttggcctcccaaaatgttgggattacagacatgagccaccacagctggcctaaaagacatcttaaatttaaccagaacttttgttttttctcagccaaacccattaattttctgtcttttctgtatagtgaatgacagccccatccacaaggttgctcaggccacagcctccatatctccctgattcctgtcttcctcttcccaccctgctcccctcttcccttccccatgggccccctccttgtaccctccaactaccctactagttaagcccttcagagtacatccagccatttctcaccacctccaccacctgggatattgcaacagttcctttctggtctccctgctagtcttacgcaacagccagagtagtgctttaataaaacatgttttaacctaaaagcattttagattttactacgaaatgcatcatagactcaaagtagtatatatcgtatttgtgctctttacagaataaacataagaaatactccatggctaggcgcagtggctcatgcctgtaatcccagcactttgggaggctgaggcgggtggatcacctgaggtcaggagttaaagaccagcctggccaacatggtgaaaccccatctctactaaaaatacaaaaaattagctgggtgtggtggcrcatgcctgtaatcccagctactcaggaggctgagacaggagaatcgtttgaacccaggaggcggaggctgcagtgagccaagatcacgccactgcactccagcctggtgacagagcaagactccgtctcaaaagaaaaaaaaatacttctgtacccaccacctggattacaaggtacccagtactcctgaagcctcttcagccctccttatttcatctacctctcttccccctccagaggaattccctgaattttgtgttgtttccttgattttctctattattatctttatagagaggcatagaaaatgtcttgcttagctttgcgtattttttagcttttcatggattcatgctgtgatcatttatccatgactactctttttgctcgatataatgttttttggccatattcatccctgttaatgtctgaaaccggagttcattcattttactatatggtacaaaatgcaccacaatttatccattctttttttttttttttttttttttttgagaaatagtttcgctcttgttgcccaggctagagtgcattggcacgatctcccactcctgggttcaagcgattctcctgcctcagcctcccaagtaggtgggattacaggcatgtgccaccatgcccggctaattttgtatttttagtagagatggggtttcttcacgttggtcaggctggtctcgaactcccaacctcaggtgatccacccgcctcggcctccgaaagtgctgggattacaggtgtaagccaccatgcctggtctttttttttttttttttttttttgaggcagagttttgctcttgtcgcccaggctggagtacaatggcgtgatcttggcgcactgcaacctccgcctcctgggttcaagtgattctcctgcctaagcctcctgcatagctggaattataggtggccaccacaacgcctggctgattttttgtatttttagtagagatggggtttcaccatgttggccaggctggtcttgaaatcctgacctcaggtgatacacccacctcaggctcccaaagtggtgggattataggcatgagccattgggcctgcctcctccgagctctttatattgaggtgtgcatgggcttaacaaaatgatctgagtagctgtgaaggggagcaagcccatgacgtggtgggcagctgaggggcacaggtagaaatgaactgtgagagggtcattgccaggtcatttttgggatttttagtgcatgtttgggggcctttgattttttttttagctcctccccatggctccatttgccctcaccacaacaagctgagcatcctgtatttgcagtaacacctggacctggggttcccaaagcaagggcctttgccagatgctctacttctctgctctttcctctacttctctgctctttccagacatgtcaaaaccagggattttcccctccctaacaggcagtgcagttccttcgcgtgccccctgcgttgatctagaatcccaaggagttaatgacttccctgattgagttgcttcctttggaagcctcctgtgccagctctgcccagcccccgccttcagtggccactgcggggctgcccagccagaaaccaggtctccccaggcaggacctctcgctcccatcagctgcaaagtcactgtcttccagggccacctgcctcatgactggctctcctcaggtcacaggaagctgggagcgggaccctgaaagaactcgagttctgtccttagatgttgggcatgcagcaggcaaagggagaatgagaggagacaaggacctggcttcccatctacagactgttcagccaaggccatgcctagagtgggatctgctaaatgggcacagcagaacattggaagaagcacctttgagccagtgctgctggggtctccgtggattagagccaggagccctgatgaggcctgtgggcggggcttcactttcgaccctgagaagccaactccacatctccttccctctcacccttgagccgtgggtagttcagggaggccacagccttctttctgtgccatggcctatcccaaagtcacctccactcacaacgtcgtgaccttaggtaagttcttgtacttttgtgaacatcatttctcacccagaataatgtccttactgcaatatgctcgttccattccctgctggctttgtggccacaaatggaggggcagctacgtttcttgaacacagagcctgagaggccttgtatgcagctgctggaagcagccaggagaccccaaaagtgggctggagacttcaacaaggacagggaacagggctgcactgagaggcccaggggctaggtcagcagcaccgctaggcagatttggaggggagctggggagaggcgaggcagccagctttgcaagattcccacggcacacagccagtgctcaggggttcccttctcagcgttcctctcacctggtgtggctccctcacgcttggcatggatctgagctcctttccttatggctgagacccaaactgcctacaagtggccttttctccctgttcttgcctgcaagggcagcatggggcctcaggctgtcagtgctaccagggacgctggcattcactttgtccataatgtacagatggatgtagacaactgccctcagggctgtccgggggcaggaccaagcccagcaaccacacctcctgacacagccaggttctcccccaacggcggagctgacaggactgttcatggttcattgagtggacccagcaatacctcatcgataatccacagtcgagagaagaggggcggtcagagaccggccagccctcccttctgattgggagaggcctctgcaggcactgacaggctccagagagtgctgtggggggcagtcagtgtccatagtcccctggaatcttctctgggctgttttctctgacttttcacctgaaattaactgtacatagctgggctaggaactctctaaatctgaaagcatgtggcttagggaaaatcacttgactcgtttaccttctggctaagaagtgaagactctgggctaatctagtcctccaggccctggagtcccacacagtgatgctatctgtgcagctagagggcagagcccttggtcatgtccaccctctgattaagtgggcatctcctctcctgctagctttggggcttggggtggggctgggacaaagcctggtgcccgtgtgattcatccgcacattatttctcctctctgccattctagggtcgtgctgcggcagcctggcgcccgacatgtgaaggggaacctgccaggggattactgtgagctcacagcaggataggctggccccgggggagtggggatgggcagaacctgggccaggagtattaggaaggagacctggaccctggtagggagctcagcacaagctcgcctgacccagatggtattggacacagtgccccgctgaacagcagctgttcccagcgccagaggaccccacagccacagtaggagctttgcgacccctacgcaactgcagctggggctggggccaccaggagaagggaccagcacctcagatgggaagcagaagggcaagacctactgcggaaaggatctcgatctctgcagcggagttttcccacactcacagagcttcctgtttttgtcctctcagggttggggtctggctcccctcctctggcagaggttttgggccaggaggtgggacaacacttgcatggaacccaagtcccctgaagcccctgtgctctctgttgtgattggagttctagggcttccccgctgccgggaacgaggggccgcctcattgtctgctcatgaaccacaaggaccccgactgctccagactggattatttcaagccgccaaagagggggacccctagagctggcagccagcaatcccaagggactagagggctgcaatggactgacctccccctcaccagggtggcaggagaggcagagcctctgtggcctagctagtgacggagagacccgatgaagccctaagcaggggccccgcctgactcagggacaggacagccactcctgccaacgtgtgttctccctacatgagggagggcgtggcaagggacccctgccactgtcccctgctgcagcacgtgcccctatgccctttrcatgtggtgccagaataggcaggctacgccgtggctggcccctcagcgggctgggaaaagagtggccacggtgaccgtcacccgcctgccggcaccatgaagtgctccctgcgggtgtggttcctctccgtggccttcctgctggtgttcatcatgtccctgctcttcacctactcgcaccacagcatggccacgctcccctacctggactcaggggccctggatgggacgcaccgggtgaagctggtgcccggctatgccggcctgcagcgcctcagcaaggagaggctctcrggcaagagctgtgcctgtcgccgctgcatgggcgatgccggtgcctccgactggtttgacagccactttgacggtaacatttcccccgtctggacccgagagaacatggatcttccaccggacgtccagaggtggtggatggtaagagctgctgctcccttccagggatctgtcccccagttttagagccactcagagccccctcttggatttctggcccccagagccttgacaaaatgcctgtttgaccaagccatttataggatcacagattactgaagggcagagcaagcactgacctgatggagggggctagtattttctagtgcctgtaggacccgagcataggccagaaatgcctcctggaccaggcaggcagcagggacacagggagcaggtggcagtgaggagtacagccatggggggcctgccccagaggaaggaggcagccgcccctcggccccagcagttgttgctgcacaaggctggatctgggttttttgttttttttttaagaaaacctagaaatccagattttaaaactaaatatcctaatttatgaacattggctcaaaataattgttttttatttgtttgtttgttttttgagatggagtctcattctgtcgcccaggctggagtgcagtggcacagtgatggctcactgtaacttctgcctcccaggttcaagtgattctcctgcctcagcctcccaagtagctggaattataggcatgcaccacccctctcagctaatttttttgtatttttagtacagacggggtttcaccatgttggccaggctgatctcaaactcctgacctcagatgatctgcccgcctcagcttcccaaagtgctgggattacaggcgtgagccaccatgcccagccaaaataattgtaaataccatgagaacagagcccctttcttggttctttacaactgctagaagactttttactgggctgggataagaaagccttgtagggaaggccggtcatggtggctcacgcctgtaatctcagcactttgagagcacagggcggacggatcatgaggtcaggagttcgagaccagcctgaccaacgtggtgaaaccccgtctctactaaaaatgaaaaaaaattagccaggcatggtggtgcgtgcctgtaatcccagctactcaggaggctgaggcaggagaatcgcttgaacctgggaggcggaggttgcagtgagccgagattgcaccattgcactccagctgggcaacaaagtgagactccgtctcaaaaaaaaaaaaaaaagaaagaaaagaaagccgtgcagggactacttaatctattttatgaaataatgtgttgtctgattctagagttaaaaaaaaacaagcaatgaaaagaaccctcaggggctaagggaggtgaaggggtggggctgggggggtcctccctgtctttccagtcatcacttttctgctacttttaattccttctaccttgccccaaggctctggagtgtcactccccaggctctgcaggccatctggttgccacacatgtcatgggtggagccatgtcagcactgagtccctgcaggctcccaagctgcaagggatgagctcatgtgatcaggcttatcagaatgatgtcacagaacctgccttccagcctagactgtcaagagtgcccgaggaccagggtctgcagagctggggccactaggagccccgtgggctcttactgtgacagcttttttttgatacaggttctcactgtctttgcagtggcacagtcttggctcactgcatccttgatccccaaggctcgagcgatcctcccacctcagcttcagagtagctgggactacaggcacgtgccaccacgcctggctaatttttatataggaattctcatcttggagccaagctccctctacagatcaatctcccatcccctgagcaggccctgctcacccacaaacccatcaagttatggctccatccacataatgttttattttatttttatgtgggtttttttttttttttttgagtaaaaataattccagcactttgagtaaaagtaatttacttttgagtaaaagtaatcccaccaccttgggaggccaaggcggtagatcacctgaggttgggagttcgagaccagcctgaccaacatgaagaaaccccatatctactaaaaatacaaaattagtagggtatggtgaagcatgcctgtaattgcagctactcgggaggctgaggcaggagaatcccttgaacccgggaggcggaggttgcggtgagccaagatcgcgccattgcactccagcctgggcgacaagagtgaaactctatctcaaaaaaaaaaaaaaaagagtatttcatttttcttgtttcatatgaaatccttattttcagtgtgtcttgaaaaatgggaaactttggcccttctgggctcatgatcccacgtggcagcaattggctgaagttgcctctctttgccggggctcagatctgttggctgtggaccttacctgccatgtcactcctgtgtggcacttgctgggcctgtaagcatctggttggtgctgcctcgtttcatggtctttgaccattagttggttggtacaggtctcgctggtaggaggggacaccagttttattccagccattctggctctgaaagaatttatcagcctctctgcccttccctggggctcagggagtggctggactgtcaccctggacgtggcttctgcaaccccagtcctcagcctgagtgccaggggcgccccctgtaggctgaccaggaaggatcccctgaaggaggctgctctgctccgtggcccaggcctgcaggttcccagagaatgtgtgaaaggcaccttgatccctgagccccttctagtgcatcagagctaactgtgactagcagggcacccaatctctggacattgagactcactcacaaccggggactttgctgttgttgagagagggagagaccctcactgcccagaggaaagaacccctgttccctggcagagccctggataaagaggcctgtgcccagacacaggatagtgagggcagaggaggggaggccggggcccctccttcttcacacacctctccccttcctcgttwcccatcttcccctcccttccacagatgctgcagccccagttcaagtcacacaacaccaatgaggtgctggagaagctgttccagatagtgcctggcgagaacccctaccgcttccgggacccccaccagtgccggcgctgtgccgtggtggggaactcgggcaacctgcggggctctggctatgggcaggacgtggacgggcacaacttcatcatgaggtgagcccctgtggagcccaagggtgggctcaggatgggcctccgggaaggggactgccctcctctgccttgtctggcagggtgcatgctgccagctaccggtgtgctgtggggccctgcctcccagagtctttcacagcaggcttggagctctctcctttacctgtttggggtggatggggagacagaatcccaaatctaagctttgcttgaggcctgcactctgtttccaaggctctgaattcctctggaaagagctgacattagattcctggctgattgtttggtgaaaaatcccatcagaggcagggcatggtggttcacacctgtaattccagcgctttgagaggctgaggtgggaggatcgcttgagcccaggagttagagaccagcctaggtaacatggcgaaaccctgtgtctacaaaaaatttttaaagattagctgggcattgtggcgtgtctgtatttccagctactggggtggctgaggcaggaggattgcttgaacccaggagtttgaggctacagtgagctatgattgcaccagttcactccagcctgggcaatagactgagaccctgtctcaaaaacaaaaattcccatcagaagccggccctgtcctcctcatcccctcagcagctgggcaaggagtgagggccccaagcccagctagcatcctgcttcatagcagcaggtgattctcgctggcagatgcatagaaggcagatgttgtgggtgctgaaaggagctgttcggtatttgctctagggctcattcattcccaagacctctatgcccagccgtgaggaagggagaagagttgggagggcgttcagtcttgaccgagactctgcaatgaaggcctgggcgtgaacagggaatagggggcaggctcacgacctgaacgtgggctgcttgctctgctccagagcctgcgttttctgacatccccccttgacttggctggggacaagaaatgcctcctacccgactccttggtagaggaagagcctgaagaacagagctcctgccaatgcccagttttcacgcatctcttaggatgagcattgcagttaagaccaggtttcccaggaggcagaaggaagggctttgtcttagaaactgttgctgtctccatagcaacacgaaggcagcaatatgtctcggaggcattcagcattccatgtaagaccttcctcatgttgggaaatggtgcaagtgggagggtgagcaggttggagtggaccctgtccaggacmccggagccacctgagggtatccatatcctccaactgctgataccccaatgggagggagatgggatgggagctggtcttagaggggcctctcccctccccagacaccatggccaggttgggaattgaggcatctgtcacttccatgcagctctgcgcactcgggaagcccaggacaatgctcttaggtgcccaaagcacctgcatcaagtttgagctttcactggtcaggcacctcagtgatggtcaggaagctcctgggtggaagccctgcaggtccaaaaggactgcctctaagtcatctggccggtactgtcaggtggggctgcagaaagaaatttataaggctgcacatgctgtggctcatgcctgtaatcccagcactttaggaggctgaggcaggcagattacctgaggtcgggagttcgagactagcctggacaacattgtgaaaccctgtctctactaaaaatacaaaaattagctgggcgtggtkgtgggtaactataatcccagctactcgggaggctgaggttgcctgaacccaggaggcggaggttgcagtgagccaagatcatgccattgcacttcagcctgggcaacaagagagaaactctgtctcaaaaaaaaaaaaaaaatttatagatgcttcctcacaggggccaggtaaggaaggggggtggtatagagtggaccccagaatcactttctggaaggggtgacctgggtagtaattggccgtctgctggtctgaggaactggatggcagtggataagctgggcttgttggtgtgagcctgtagtcctagctaattgggaggctaaggcaggaggatcgtktgagcccaagagtttgaggctgtggtgagctatgatggcaccactgcackccagcctgggcaacagagcaagaccctatctcaaaaacaaaaacaacagatggcactgggggtgactccaattgtagacatatccaagtttggaaccaatggccctggaagcaagacccactggagggctgagctgagttacagcgagatgatggcctgatccacctgtgccccacccacctcgctgccactcactcctcctatttgtcctctgagccctgtggaccacttcaagtccagttgagctggtcttgcctcagttggccagcagatccatccacaactccaagaacagtgcccgctagacagtaggcacgccgcagatacatgcaggagtgaaggggactaggcagccaacatcaggtcctaaccagggggcacacaccccacttgcgcccctgtccctgaatacttctttagctgctggaggcagccaaggacagatagatttctagaatgctgtgttcccgagtgccagagatgcagctcatcctcctcgtcctgctctggcccctttccagggcgtggcttctccaggatgaatcagagccttgaaacaaaaccttgtccctgttagagtgccatgttccttccctttcccttggaggctgtgaaacatattttgggacctcttgctcccttcattcccagatgtttggaagctggtatctggccaaccatggggaaatgagggagggccaggctctgcagcatggccagccacaggcgctggaggcagggtgaccctggctgacaggtcccatggggacttcatgacagctcaggctgccaagtcagtgcagaagacagatggtgggtcttcagaaaccagcctgggctggctgcagccctgtgctctgcaggatctcttggcctcaccatctctggtgagatgaagtttgtttcttaggtcaagtgtacaccttggctgggcgcagtggctcacgcctgtaatcccactacattgggaggctgaggcgagagaactgattgagcccaggagctcgaaaccagcttgggcaacatggcaaaaccccatctctatttaaaaaaggagaagaaaaagagcataccttgatcctagctcctgccccgcccaggccccggccagcctgtgtcaccagcccaattcctctaccccctgcttacccctgccataccctgggcagctgagacacacttctggctctgacatcccctgttaaggcttcctctccaactgatctgttcctcacaggccccagggtgcttggcaggaggcagatacagactgtgtcagtgtgaccataggacaccaatacctgcatggggagtttagcagcccacaagctattaagagttattcaggggtgggaaggatacttcttggctcttctaggagacaggatctctaaaccctaaagaccgggctcaaaggggcagttcactgaaggacatgaatttgggagagggaggctggaagtagatccctgttctggagacagagcatgttagtttctctggaggaaattctgggcatctgcttgaagccagctagaacggaagtggttaggaacacagaggttctctaggttttgagacctcccaccccaaagcaccctccagaccctcaagggaagggaaaatgagaggtagggggcacagtgatcctggacagcacagcccatggtccttcccagtcccgtccctgaggaagacagcttgggagcccctggaacacagcaagtcctcacccagcccagctagctggtgccagccactctaaggacagggaatgtttgtgctggttttacagaactggcataaaaagcaaggagagccacctagagactgcgctccctgcttccctggctccctgtgttcctagtggagggccaggttacggtcaccctgctttggtagtcatgattccacaaggtgtggtccacgtgagacaggaatgtgcttgtaaacagtcataacagaaaaaaaaagaccaacaggtttgtgtttaaacctggttcacctgttacgtaagatgcatactaaaaaggggagctttggtttttacttgtcttgtattttgcacaaattgaaaggaagtggaagccttcttggcttattatagccacagagaaggtttccagacaggagctacagcaatgtcccctctgtccagacagcagcaggagagaggggacattgcacatcaccagaaagatagcaagggcagaccgtcagaacttggggcatttctcttggccttggagtggaagggcagacagggtcttaaagcggcagacaggaatagggtggtagtgggtggcaggacagaggcttccatccggcccagggcctgagggaaggcttgaacttcctatcttactttcaccatcttataggaaggagggcagaacagccaagtgaagtggaagctgcggaaggctgttctttataagttgtttctttaaaaaattataaaaggccaggcctggtgtcatctgcctgtagttatggctactcaggaggctgaggcaggagggttgcttgagttcaggagattgagaccagcctggacaacgcagtgagacccctatctctacaaaacagaaaacaaaacaggcgtggtgatgcagacctgtggtcccagctactcgggaggctgaagctggaggattgattgaacccaggaggtcgaggctgcagtgagccatgatggtgccactgcactccagcctgggtgacagagtgagacttaaaagacaaacagggccgagcgtggtggctcacgcctgtaatcccagcactttgggagactgaggtgggcggatcacgaggtcaggagatccagactatcctggctaacacggtgaaaccctgtctctactaaaaatgcaaacaattagccgggcgtgatggcgggcgcctgtagtcccagctacttgggaggctgaggcaggagaatggcgtgaacccaggaggcggagcttccagtgagccgagattgtgacactgcactccagcctgggcgacagagcaagactccgtctcaaaaaacaaacaaacaaacaaaaaacccaaacaaacaaaatggctgggctcggtggctcacgcctgtaatcccagcactttgggaggccgaggccggcgcatcacgaggtcagtagatggagaccatcctggctatcagggtgaaaccccgtctctactgaaaatacaaaaaattagctggacgtagcggctaacgcctgtaatcccagctacttgggaggctgaggcaggagaatcccttgaacccaggaggtggaggttgcagtgaggtgagattgcaccactggactccagcctgggcgacagggcgatccgtctcaaccaaaaacttagctgggaatgctggcacatgttgtagtcccgtctactgaggaagctgaggcaggagaatcgcttgaacctgggaggcggaggcggggattgcagtgagccgagatagcaccactgcactccagcctgggtgacagagtgagaccttgtctcaaaactaataataattaaaagtaaataaataaaaatgtatacagtaaaaatgagttaagcccccaatgttagtaacctttttttttttttttttttttttttttttttttttttttgtagagatggggtttcaccgtggtctcgatctcctgacctcgtgatccgcccacctcggcctcccaaagtgctgggattacaggtgtgagccaccgcgcccggccaaccttttttttttttttttttggagacaagagtcttgttctgtcacccaggctggagtgcggtggtgcgatgtcggctcactgcaatctctgcctccaggttcaaacacatcacctgcctcagtctcccaggttgctgggattacaggtacatgccaccacgcccagctaattttatatttgtttttttttttttagtaaagatggggttttgccatgttggctaaggctggtctcgaactcctgacctcaaagcagtccatccaccttggcctcccaaagtgcctggattacatgtgtgagccaccacacctggcctgtttgattgattctggtgttactattgtaaataattctgcagtgaatatcctcatacacatctttgcacacctttgtaaccatttttatagggcagatttctagcaatggaattgctaggttggagtatacacccgtttgcatttttgatggatggcttcgaactgtcctctaagaatcttgtatcagtttccatggcagttgattctcatgtcaccctcttgtccctgcaggatgaatcaggcgccaaccgtgggctttgagcaggatgttggcagccgaaccacccaccatttcatgtaccctgagagtgccaagaacctgcccgccaacgtcagcttcgtgctggtgcccttcaaggtcctggaccttctgtggatcgccagcgccttgtccacggggcagatccgattgtgagcytcttgctggcctgggtagaatatgggtgacargaccatcttgggcagagtcttctaggggccagattgtaggattcctttcattgaacattttggccaagaggggctggtgagaagggagggcctaagttggtgggtgagctgaaggcacagcttgctctgtgtcacctcctgtgtggtgacacagcatattgatggtggaaagatgaggaaggatctgtttttttgtttgtttttttttttttttggagacagaatttcgctcttgttgcccaggccggggtgcaatggcgcgatcttggctcactgcaacatccgcctcccgggttcaagcgattctcttgcctcagcctcctgagtagctgggattatagggatgcaccaccacgcccggctaattttgtattttagtagagacaggtttcttcatgttggtcaggctgatctggaactcctgacctcagatgatccagctacctcgggctcccaaagtgctgggattataggtgtgagccaccgcacccggccagaccatctggttttggtctcctttctgggtgatggctcctgactgagggagctctgccttctgaggactttctttgggggtagttgtcccatcatagccgggaaccatgggaaatctagttcaccaagtatattttttaacagctttatcaagatatgattcatatcccatacatctcacctatttaatgtgtataatccagtaacttcttatatattcagagttgtataaccatgactacaattaattttaattttttttaattttatttttttttgagatggagtctcactctcttacccaggttggagtgcagtggcgcaatcttggctcactgaaacctctacctcccgagtttaagagattctcgtgcctcagcctcccgagtagctgggattacaggcacatgtcaccatgcctggctaatttttgtatttttagtagagacggtgttttgccatgctggccaggctggtctcaaactcctgacatcaagtgatccacctgcctcaggctcccatcgtgttgagattacaggcatgagccaccacatccggcccacaattaatttcttttgaaacggagtctcattccgttgcccagactggagtgcagtggcagaatctcagctcactgtaacctccgcctcccaggttcaagtgattatcctgcctcggccttctgagtagctgggatcacaggcatgtgtcaccacagacctggctaatttttgtatttttagtagagatggggtttcgctatgttggccaggctggtctcaaacttctgagctcagatgatctgctcaccttggcctcccgaagtgctgggattatacggcatgagccaccacacccggccccacaattaattttaaaacattttcatggccgggcactgcggctcacgcatgtaatcccagcaccttgggaggccaaggcgggtggatcacaaggtcaggagttagagaccagcctggccaacatggtgaaacctcatctgtactaaaaataaaacaattagctaggcgtggtggcatgcgcctgtaatctcagctactcaggacgctgagacaggagaatcgcttgagctcaggaggtggaggttgcagtgagccaagaccacaccattgcactctagcctgggcaacaagagcaaaactctgtctcaaaaaaaataaaaaataaaaatttttggccgggcatggtggttcatgcctgtaatcccagccctttgggaggccgatgtgggcgatcatgaggtcaagagatcaagaccatcctggccaacatggtgaaaccttgtctctactaaaaatacaaaaattagctgggtgtggccggccaggcgtggtgagtcacgcctgtaatcctagcactttgagagaccaggcgggcggatcacaaggtaaggagatggagaccatcctggctaacaccgtgaaaccccatctctactaaaaaataataaaaaaaaattagccggccgtggtggcaggcacctgtagtcccagctactggggaggctgaggcaggagaatggcgtgaacccgggaggcggagcttgcagtgagccgagatcgcgccactgcactccagcctgggtgacagagcgagactccgtctcaggaagaaaaaaaaaaaactagctgggtgtggtggcgcacgtctgtagtcccagctacttgggaggctgaggcaggagaatcgctcgaacctgggaggcagaggttacagtgagacgagattgtgccactgcattcaagcctgacgacagagattccgtctcaaaaaaacaaaacaaaacaaaaaaaattttcatgttctgccgggtgcagtggctcacacctgtaatcccagcactctaggaggccaaggagggtagattgtttgagtccaagagtttgagaccaccttgggcaacatggcgaaactctgtctctgcaaaaaatacaaaaattagccagacatggtggcatgctcctgtagtcctagccactcaaggatgaggtgggaggatcggatcacttgaacccgggaggcagaggttgcagtgagctcagatcgcgccactgcactccagcctgggcaacaaagcagggctctgcctcaaaaaaaaaaaaaaaaaaaaaaagaaccaaaaaaggaacattttcatgttctaagggtctttaatctaaagatacccccggatccctaagccatcacccccactcctcccaccccgagccctaggcaaccattaatctactctgtctcaccatatatttttgttgtgtggtaaaatatacacaatataacatttgccattttaactatttttaagtgtaaagctcagtaacattaagtatattcacattattgtatagccatcaccactctccatttccagaacgttttcattatcccaaatggaaactgtacaccttaaacactaactctccattctcccctcaaccccaggtaaccttattctactttctgtctctatgatttaactattcttttttgtttgtttgtttgtttgtttgtttttggagacagagtctcactctgtcacccaggctggagtgcaatggcgccttctcggctcactgcaacctgggttcaagcgattctcctgcctcagcctcccgagtagctgagactacaggcaagcaccaccacgcccagctgattttttgtatttttagtagagacggggtttcaccgtgttagctaggatggtctcgatctcctgaccttgtgatctgcccgcctcagcctcccaaagtgctgggattacaggcaggagccaccgcacccggcctgtttgtttgtttttgagcctgagtcttgctctgttgcccagcatgtagtgcaatggcatgatcttggctcactgcaacctctrcctcctgggttcaagcgattctcgtgcctcagcctcccgagtagctgggactacaggcatgggccaccatacccggctaatttttgtatttttagtacagatggccaggctggtgttgaacccctgacctcaggtgatcggcccaacttggcctctcaaagtgctgggattacaggcatgagccaccacacccagcctgatttgactattgtgtttttttttttttttttttttgagacagagtttcgctctgtcgccaggctggagtacagtgtggcacaatgtcggctcactgcaacctcagactccctggtccaagcgattctcctgcctcagtctcccaagtagctgggactacaggcgtgtgccaccacacccagctaatttttgtatttttagtagagacagggttttaccatgttggccaggatggtctccatctcttgaccttgtgatctggccccctcggcctcccaaagtgctgggattacaggcgtgagccaccgcacccggccctgatttgactattctttatgcctcatgtaagtgggatcataacagtatttgtccttttgtctgacttactttacttagcataatgtcctcatagttcatccgtgttgtagcatgtgtcagaatttcctgtgttttttttaaaggctgaatactatgccaatgtagggatatacccattttgtttatccgtttatccttcaaggatgcttggtttgtgttctaccttttgggtatcatcaccatgtattttataaacacaaaagtaatgagttacagtttcctgacttaggatgttcattatctcatgtttgggagacctgagggctaaaatggatgcagtagagttgaagtaccatagacactcagagaagggcatgtaggttacgggggccgtggctggctacagggaggtgtggtctgggaagcctgaggggagtggatcgagggcaggggtgagagcagagacatggtggatttgagatgattgccacctctaatggagcagagagctaggggaggaaggttggggctggtctagggaaggccccatcgcttgctgaaaacattcccattttatcttggatgccatggggaccgttgaaggctttagagtaaggcatggcaatgatgaacaagccacgggagagcagtccagaagcagagcagtctggaagttgtggggctgacattgctcaggcctggcgtggggggcatccctaggtcccatggggccacctgaaatgttatcttttcttcctttcctttctcctttcctttctcctttcccttcttttcctttctcctttcccttccttccctttcccttcccctccccacccctctcctttcctttcctttcctttcctttttttttttgacagtctcactctgtcacccaggctggagtgcagtggtgtgatctcggcgcactgaaacctcagcctcccaagtagctgggataacagctgtgctccaccacacccagctaatttttgtttttttagtagagatggggtttcactatgttggtcaggctggcctcaaactcctggcctcaggtgatccggctggcctcgaactcctggcctcaggtgatccacctgcctcagcctcccaaagtgctgggattacaggtgtgagccaccgtgcccagcctgaaatgttatctttctttctttttgcttacagcacctacgccccagtgaagtccttccttcgagtggataaagaaaaggtaagctccccacttcttccccacctcagtggaaacagtgctggcccagcctgtgtgcctggtcctgtagctcaggtgttccatttcccctgcagaacctcagggtccccatctgccgagatgcctgaccctagcrggtgccacacgattcaggagacacagacgcacaggtctctgacaggcatagacaagtagaagctgctcagtctagcctgaatctctgcccctaaacccctcatatacctgtcatcccttctcctcccaggtccagatctacaacccagccttcttcaagtatatccacgacaggtggacagagcatcacgggcggtacccttccacggggatgctggtgcttttctttgccctgcatgtgtgtgatgaggtgggtaggcccrtggtgtgggtggtgggaacccatggaacagaggagtgcaggccttctcgggtcttagcaggctaacagaggaatgtgcktctgtaggcagaatccatgtggccttggtttcccccatctctaggctgtaaagtatagatatgcctttcccaaacgtttctgctttcatgattctaccaaatccaaaatctcttcattaaaaagttattggccgtgcgcggtggctgacgcctgtaatcccagcactttgggaagctgaggcgggcggattacttgaggtcaggagttcaagaccagcctggccaacatggtgaagccccatctctactaaaagtacaaaaaattagccaggcgtgttggggcacgcctgtaatcttagctactcgggaggctgagtcaggaaaatcgcttgaacccaggaggcgtaggttgcagtgagccgagatagcggcattgcactccagcctgggcgacagaatgagacgctgtcttgaaaaagaaaagaaaaaaaaacataaatagaatggagagtgtatgtagttgaatttcagctggacgactgcccccaccagctctgagccccaggcctacttcgtgtaaaaatggaactcagtcgttcagagaacccgttccaccagtggccagggctgccttgcaatgaagagcagggctgaggcccggcaagtgcttcactgagtggtgctgatcaaagtactccattaaaaaaaaaaaaaaaaaaaaggaggaatttgcaagggctgcaaagggaaggtggtgtccccatgtgagtccatgtccttaggccaggcctgggggctcctgcatctccccggggcctcccgtcccctctcctccctgtcatcccgagcccgccccgcgccatcctccaggtccccgcctggggtgacgctccgctgcgcttccccgcaggtgaacgtgtacgggttcggggccgacagccggggcaactggcaccactactgggagaacaaccggtacgcgggcgagttccggaagactggcgtgcacgacgcggacttcgaggcccacatcatcgacatgctggccaaggccagcaagatcgaagtctaccggggcaactgagccgggcctcgccgcgacccttscrgcccatctatcgggcaccggggctccggcccgggacccaggaccagcaacccgcgaccaatcatgctgcagcccaggggcgtctgctgtgccccgccaatcacgagactgggggaccggccgggcctggcaccaatctgcgctgcggtcgggcggagcttctgtttctcccagccaatcatgtgactcaaggaaaacttccggcgctgtgtccagtctcctccaatcaatggccttcgggggcgggccagcggccgctcaatccccactccctcatgctttgggttagggttttctttcacgctttctgaggaggagagcatggcgcgggcytcggcgaagcacttccgtcagcctcgggcggaggatcgtcttagtagctggccagacctggaggagagcgggcggtctttgcgggcctcaggagataggtggccgcccggcccctttccccgcctgcccggataggtgcgtgcagacccaccaaagaaaagcggtcgctgcgggacccccagtcccacctcggccgcgctgtgggatggctgcgcccccagggcttcctgcgtctccaggaagccgggagtggcgccctctgcggggtggggtgctcccgggccgaactccggacaggtggaggggacagggcagagctcgaggaagccctgtccccttcagtgcaaggtgctgtcactcacgtgtgccctcgaccctcccgttcacccgcagccttctcagcgcctctccctgggccggaggcctcctcaccagcctacctgttgctctggaaaaaaatcccgtcccccgactccgtccctacccccagtcttcggccggctctggcccctggggagggggctgcacggcggaaggaggctggctatgggcccggctgcccgctgcatgtacctcctcctccacccatcgcctcttgcctgggggtaactttgcctggggctcattctttggttaagctgaagctgccgtgggtggccaaaccgcagattctttgcaaattctgagctggcagagctcgcagccgggagccggccggggaagaggagacttgcgcgccgcaagccgcctgcctccaccctgctctccatctcccgctctagaagggctgggaagctcgcggccggggttccacctggaagctgcttgcatggctgaacccagcttaggtccctgacggggctgctggtggaattctcccccttcgaagctggggaggtttaggagggggaaggcttctgtgaagctctcaaaccactaatagagccccctccccaacagtgacggcgcagatgctcccccttttcttagttgacaccaccaggcagcttcctggccgttggtaggttcctgcagctggctgagggaacagggaccggcaggggactttgttaggggagggttgggatgggcagtgggcccctgaaagttaatatattggaacctagctcgagtgtcgttctttccaattccgaaagtagaaagagtaaaaataggggtgattggggtggggttagtagaatgcctctctcagggcgctcccccctcccccaccgttttagagagctaggcctcagccagtcttgccactcccatctcagtgcttcctgaagaggctgttttgagtgttgatgaaaagcaatgcaattatgccaaacagtattgagcagaataatttatttcttttttttcttttgctttaaatcatgaatcccgccaggtacggtggctcacacctgtcatcccagcactttgggaggccaaggcgggcggattacttaatacttaaggtcaggagttcgagaccagcctggccaatatggtgaaacctcgtctctaccaaaaaaaaaaaaaaatacaaaaattagccaggcgcagtggtgcgcacctgtaatcccagctacttggaaggctgaggcaggagaatcccttgaaccgaggaggcgaaggttgcagtgagccgagattgtgccactgcactccagcctgggcgacagagcaagaccctgtctcaaaaaaattaaatcatgaatccccatcctggaagaggtaggtcccagcatccagccagattttctgcaatagtaatttaaacacacttttttatttccttccctttctgaattaaaaggaacaaaaaactgtctagtccttcattgttctgaaatgggcatgatggaagaaggcgggtctggtaggatagctgtgactgataatggctgagaacgttgggggatatgggaggggcgagatgactcccagataccctcccccacctatacaggaggcacctcattcctggactctgcgctccaagacactgaaatctgagcgggtacaagcattttggttaaaaatcagctcgttgtcgcctcttgagtttcctccaggagaggagttcattggagaggattcctggtagcagctcctcgcagtggctgtcctgtaaccactttggcctctgtcaacatgatgtctccaggtatccatcaggctccgatacatttgggtggccacaggctgggctgtccccacctctcagggaagtgcatctaagtcaggttttcccctctggcacagccctgcctccacagcccaatttccaccatgccacaggcaacccgcatttttatttatttaatttatttatttattgagacagagtcttgttctgttacccaggctggagtgcaatggcccgatgtcggctcatcccaacctccacctcctgggttcaagcgattcttctgcctcaggagagtagggagtagctgggattacaggcatgcaccaccactcccggataattttatatttttagtagagacgggttttctccatgttggtcaggctagtcttgaactccagacctcaggtgatctgcccgcctcggcctcccaaagtgctgggattacaggcgtgagccagtgtgcctggccgattttttttttttgagactgattctcactctcgcccaggctggagtgcagtggtgggatctcggctcattgcaagctccgcctcccgggttcacgccattctcctgcctcagtctcccgagtagctgagactacaggtgaccgccacgatgcccggcagtttttttgtatttttagtagagacggggtttcactgttagccaggatggtctccatctcctgacctcgtgatctccccgcctcagcctcccaaagtgctgggattacaggcgtgagccaccgcgcctggcttttttttttttttttttttgagatggagtcttgctctgtcacccaggctggagtgcagtggcgcgatcttggctcactgcaacctccgcctcccaagttcacccacctcaacctcccgagtagctggaattacaggggtgtgccaccacacccagctaatttttgtatttttagtagagacggggtttcaccatgttggccaggctggtctcgaactcctgaccacaggtcatccaccccctttggcctcccaatgtttgaccacacccagcccataatagatttttaaaactcctataaatatcattctacttccctttattgctaaaatgggagctttttcatccagttttttgggtgtgttccaaatattttgttaaatttcccgtctattgctgttattgtttccatttatttgcccatgtgagttgatacctttttcattcctttcccatagctttagtgacgttgtgggaagggaagttaggtaagtgatgtttcatcttgtacttactagacacctttttcttccttgatttcctgagttccctgcctccacaggtgtgtttcactcctggttgcttatatttttttatttttgagatggagttttgctctgttgaccaggctggagtgcagtggcatgatctcggctcactgcaacctgtgcctcctgggttcaagcgattctcctgcctcagccacccaaatagctgggattacagatgcgcaccaccatgcccagctaatttttgtatttttagtagagacggggtttcaccatgttggccaggctggtcttgaactcctgacctcgtgatctgcccaccttggcctcccaaggtgctggcattacaggtgtgagccaccgtgcccggcctctggttgcttatttaacccctttgtcacgatggaggcttttctcttttttttttttttttttcagatggagtctctctccattgcccaggctggaatgcagtggtgctatgtccgctcactgcaagctccgcctcccgggttcacaccattctcctgtctcagcctcctgagtagctgggattacaggcatgcactaccacgcccggctaattttgtatttttagtagagacggggtttctccatgttggtcaggctggtcttgaactcctgacgtcaggtgatccgcctgccttggcctcccaaatggtaggattacaggcgtgagccaccagaccctttttttttttttttttttttttttaagagacagggtctcctgtcgcccagactggtgcagagctcactgcagcctcaaaaactcctggattcaagtgatcctcccacctcagcctccagagcagctagagcctagctaaaaaattttttaaaaacattttatggccaggcacggtggctcatgcctataatcccagcattttgggaggctgaggcaggtgaatcacgaggtcaggagttcaagaccagcctggccaagatggtgaaaccccgtctctactaaaaatacaaaaaattggccaggcttagtggcagacggctgtgatcccagctactcgggagaccgaggcagagaattgcttgaacctgggaggtggaagttgtggtgagccgagattgagccactgcactccagcctgagcgacagagtaagactccgtctcaaaaaaaaaaaagtattttacccatccacaggcagcagacaaggaagtaccttctgtgactgtctggcaaggtcagaggcatcagggaaggtaaaatactgaaactatatttttaaaaataaaagtattcccttttgagtgtgaattaggaatcaatgccccttctcactacttttgtgaaaaaaatcacagctcctgcagcaagtctatgcctgggtaacaaccaacccacaaaatccaagaggaggtccccctctcccgcctctgtgaggcttgaggagcagtatgtatctgggccagcctggtcctcagagtgtggaattaacacctttcctctagcaactgtttgtgctgctgagaacagcacagactctctggcagcctggttctctccagagggaagcctgtgaagcagaagaaacatatggcatctgcactcagggcgcccagttccatccggccttgctataaaatgactttgcctttccttttttaaaattacaaaaataattcaaccaatacataaacatatgaagtgaatcacggagggccttcctgcgatatctttttttgcctaccatttgtcatggaatgggtaaaggggaccacagagggaagagacgctgccccttcgcagggccatggcagtcccctgggctgcgtctccacggtgcttcctgtgaaacgctgttaccacgggcaccgcactggagaccatgaaagggaagagtttgacatctcagctgtctttgctataaatagaaataaataaaccttaactaaggcttgagtacacttaggccgggcaaggtggctcacacctgtaaccccagcactttgggaggccaaggtgggtgggtcatgaggtcaggagtttgagaccagcctggtcaacatggtgaaaccctgtctccactaaaaatacaaaaaatcagctgggtgtggtggcaggtgcctgtagtcccagctactcaagaggctgaggcaggagaatcacttgaactcaggaggcagaggttgcagtgagtcgagatcaagccactggagtccagccggggcaacagagcgagactccatctcaaaacaaaaaacaaaaaaaaatttttttatcagtcaccttaaccaaatgatcaaggtacatcaccagtctaatactaataaaaactctgtacatgattgaataaattaatcagtgggggagaagagagaattctcccttgcagaggagttgaataattaatgtaggtagctactctgcccttaaggagagcatgtaacttccttgaggtgtgggctgcatgtacataatgacttcctttcaaagagtaggatacaggccagggctcagcacagtggctcatgcctgtaatcccagcactttgggaggccaaggtgggcggttcgcttgaggttgggagttcaagaccagactgaccaacatagagaaaccccatctctactaaaatacaaaattagcccagtgtggtggcaaatgcctgtaatcccacttgggaggctgasgcaggagaatcgcttgagctggagaggcagaggttgcagtaagccaaaaccgtaccaytgcactccagcccgggcaacaagagcaaaattccatctcaataataataataataatgtagtgagacaagaatgggcagctccccaacagaaaagattttctaagaaacttaatgtttgccaagcctcactaaatcaaaatcaaacaatgacataatctgtttttgccacttagactggcaaagttttaaacattgataatactgttggcaagcacgtaatttttgtatcacagtaacataaattggtaaaaacctttggcaagtgtaaatgacaatgaattaaaattttaaatgtccctactctttgacccaacaattctacttccaggaataatatcctgaagtgattttcaccaacgctcaaaaataagaataaggttgggcatgatggctcatgcctgtaatcccagcactttgggaggcccaggcgggcagattacttaagctcaggagttcaaaaccagcctcggtaacatggtgagaccccatctctacaaaaaaaaatacaaaaattagccgggtgtggtggtgcaggcctgtagtcccatctacttggaggggtgaggcaggagggtcacttgagactgggtcgaggctgcagtgaaccgagatcatcatgccactgtattccagcctgggtgacaaagtgagagctggtctcaaaaaaaaaaaaaagagaacaaagatgttcagtttgggtcaagggctcatgcctgtaatcccaactacttaggaggttgaggtaggaggatcaatttagcccaggagtttgagactggactgggcaacttagtgagaccccatcgctacaaaaataaataagcaataaatcttttttaaaaagatgttcaggccaggcacagtagctcacgcctgtaatcccagcacttttggagaccgaggtgggcggatcacgaggtcaggagtttgagactagtctgaccaacatggtgaaaccccgtctctactaaaaatacgaaaattagctgggtgcggtggcatgtgcctgtaatcccagctactcaggaggctgaggcaggagaatcgcttgaacccaggaggtggaggttgcagtgagctgagatcacgccacggaattccagcctgggcgacagagtgagactccgtctcaaaaaaaaaaaaaaaaaaatgttcggccaggcgtgatggcacccacctataatcctagcactttgggaggccgacagaggtaggcagaccacttgaggtcagttcgagaccagcctggccaacatggcaaaaccccatctctacagaaaatataaagattagctgggcatgctggcatgtgcctgtaatcccagctacttgggaggctgaggcaagagaactgcttgaagctgggaggc

SEQ ID NO: 95551 - DNA, 191968 bp, Homo sapiens
  misc_feature (1)...(191968): n = A,T,C or G
aatatactacatagaattgacttgtttaataccacccctcccttgtcctctgcctccagcatactccctagagtagtacaggcagggtagatctaactattggaaggaatccctaacacttttccagggtagaattctggctggtccaaaaagggtccttcttttaagggttttgagaaactagacactgcaacttattagtatcggcgacgtttgtttggagcaaattcagctccaggagctgcatggttgaatgcaggaggagtttcaccaattgccccaattccttccattgtagcagcctgaccaaagcgttcagttgttggtggggtcaatcccaaagttccatccggcatcatagtggcaggtcctggaggagctggggtaccagctggcacaggagcaggggtcaaggcacctctgctgtttatgcccatagcacctcccatagccatctgacccatccaaatctcctgctctctcacatcagggaaggttcccttgaatccttcctgctgtggctgcatcatttcttcttgctgccgccgcatctcttcttcagggcgcctgcgctcttcctcctgcctgagctccagttgctttcgtttttgcacctcttggttgtgcagctcttccatcctccgaagttcttcttggcgcctcatcaaattctgtctcattagcatgacctggtgcttatggcgtgcagcctccatctccatctctggcttctcacgagcctctttgatgttgcggtccacttggtcctgctgctgcttctccatctcaatgagtgccttccagcgcatggcatattcatactcaaaggagccaggctgtgcaaatctgggtggttgctctcgttccttgtgaaattgctggttttttataaccagcttctctggaagtcccccttcatcatctaactggtccatgggctccatagtcacaggacgaggaaatgtggttagcaggaaggagccttcactgcgtctgtccagagctttcccagcagctggcttccckgagaactcaacaatgccttttcctgagggccttcctcgatcatccacaatgactacagccctctctacctggccaaacacagaaaaggcttcttccagcacttcgttggacacatactgaggaaggtttcgaactgtaagggatgcactatggcaggaaaagcgcacacgcagctgctttccacagagtggcatattgtccagctccactttcgcaatctccgctagggttcgtgtttccaagcggataaagccaaatccttaatccttatgaatgaagacttcgcctgcctttccatatttctcaaatagtttcctcatttcttcctcagtgatgtcgggaggaagatttcccacaaaaagacggcttcgttgggtgaaggtcttctctcctggttttctaaaattcttcaggccaaatagtcaaagccttcattttggctgctggcctgttgcccatttgcaggtattggcggtggtggcggctgcagctgttgctgctggtggtgatgttgatgatgctttcttggagtatggttttgcttctccaagttaaaagttttattactctgcatttttgcaccctcaacttcgattgaagacagcaaagtgcctcccacttccctctaacctggacttctcctctaccgactggtctctcctcggagtaacggcgacgctacacggcctctcccgtcccgagaaaagcttttttttgttttgttttgttttgagacggagtcttgctctgtcgcccagtctggagtgcagtggcgcgatctcaactcactgcaagctccccctcccgggttcacgccattcccctgcctcggccacccaagtagctgggactacaggcgcccgccaccatgcccgactttttttgtatttttagtagagacaggatttcaccgtattagccaggatggtctcgatctcctgacctcgtggtccacccgcctcggcctcccaaagtgctgggattacaggcgtgagccaccgcgcccggccaagataggtactgttttacagacaagggatagctaactaaagccactaggtgtagctgacatggtcagtaagtggtgaaaataacgtaacacccagacaaactgattcagagccacttttttctctcttctcttcttttttctttcctttccttttctctctctctctttctttctttctttcttttttttttttttgagacacggtctctctctgttgcccaggctggtgtgcagtggcatgatcatagttcactgcaaccttgaactcccaggctcaagtgagcctcctacctcagcctctcgagtagctggcaccacaggcccacaccaccatgcccagctagttttttcatttttacttttgtagagatgagagtctcatcatgttgcccaggctggtctgaaactcccaggttcaagcagtcctttagccttggcctcccaaagtgctgggattacaggtgtgagacacggtgctgtccctgagccacctaattatccattctgttatactgactgctgcttatgtgccttcacttcattttgagcaacgtggggccagagtctgtctaatttgtcttaatagtctcaccccacctccctaagcaacacacataatttggtagcaaataattccttgctgaattgaacagaaggtgtatttagtgacttctacgtttccttgcaaatctgaaattttatgattataagatccggtgaattttgctgaatgtcgacttgggtcttcatgcaaactttcttcatgaagtcttcacgccagctggattcctcaattgtcatttatctgtcctaccccaaaaatccttcagtgctactgaatattgcctttcagcaattacccaaattcagtctttctctttttttggggtggcgggaaggggactgagttttgctctcgtcgcccaggctggagcacagtggtgcgatctcagctcactgccacctctgcctcccaggttcaacaattctcctgcctcagcctcctgtgtagctgagattatgggtgcccgccaccacgcctggctaatttttgtatttttagtacagatggggtttcaccatattggccagatggtctcgaactcctgatgtacggtgatccacctgccttggcctcccaaagtgctagaattacaggcgtgagccattgcacctggctcaacatttctcaccactcagtctcttcattatctagaacgtgcctgtgctacctgccgtaacagagtatggctggaggctatttctcattttctagtttatcatatcaattttttttttttgagacagagtctcaccctgtcatccaggctggagtccagtgtgcaatcttggctcactgcaacctccgcctcccaggttcaagcgattctcaagcctcaggctcctgattagctgggactacgggtgtgtgccaccatgcccagctaatatttgtattttttgtagagatgggttttcaccatgttgcccagtctgatctcgagcccctgacagtctgatctgcccgccttggcctcccaaagtactgggattacaggtgccagccaccgcaccctgtcagattttattcttttaatgtgcagtgtgtgctctttgcttgtcccttctcccctttggtgaacacttactcagatgccactaaatcttttctgcagggttgttaaaaaaaagcaacaaaagataaaaaatgaaatatgaaagaagaaaacaaaccgaaaccaacaaatgctagtaagtcaaggaaatagtctctaatttatctagaacagaattagtaaaactgccatcaatggaactggagaagttttagttatagtagttttataaatgagactaatatagggtttaatgtacaaagacaggactgtatctccttgaaagttaatctcttggatttggagtggtactacaaaaagtagagactaagtgttcaacctatttatttatttagatacagagtctcactctgtcgcccaggctggagtgcagaggcgttatcatggctcactgccacctccgcctcccgggttcaagcaattctcctgcctcaggttctggagtacctgggattacccgcacccggaccatgcccggcgaatctttttttttttttttttgtagttttagtagagatggggtttcaccaggttggccaagtgggtttcgaactcccgacctcaggtaatccacctgcctctgcctcccaaagtgctgggattacaggcgtgagcctccacgccccaccagccaatttaatttgtatgcatgatagaatccatcccaattcgaagacccaaaaataacagattagtacaagtctttgaggctaattacgtcattagtattaattttaatcaatggtgattaaactgagccttcattcaacttgtccagaacatcagtcaagaatgtctatttaaaatgttcttggaggccgggcgcattggctcacgcctataatctgagcactttgggaggccaaggcaggtggatcatctgaggttaggagtttgagaccagcctggccaacatggtgaaaccccatctctattaaaaatacaaaaattagccaggcatggtggtgggtgcctgtagtcccagctactcaggaggctgaggaaggagaattgcttgaacctgggaggcagaggttgcagtgagccaagattgagccactgcactcctgcctgggctacaagagtgaaactctgtctcaagcaagcaaataaataaataaataaataaataaataaagttattgggcaggcacagtggcattcgcctgtagtctcagctacttgggaggctgaagcaagaggactgcttgaagctgggagttcgagcccagccaaagcaacctatccagacccatctcttaaaaaaaatatttctctgccaggtgcggtggttcatgcctgtaatcccagcactttgggaggccaaggtgggcggatcatttgaagtcaggtgttcgagaccagactggtcaacatggaggaaccctgtctctactaaaaatgcaaaaattagccaggcgtggtggtgcacgcctgtaatcccagctactcgggaggctgaggcaggagaattgcatgaaccggcgagacggaggttgcagtcagctgagactgcaccactgcactccagcctgggcgacagagcgaggctccatctcaaaaaaaaaaaaaaaaaatatcatctatctatccacctacctacctacctacctacctggattataattcattaagttctctgtgccctgtagttgtagattaagggaatgcgattggattagtgtggaggggctttttatggagccaagcaggagtttttaagcttttgtacttttgcttcatgtcacaaggacagatgccccacaaaggctgagatgtttgtggtcctggatcttagaacagtgcctggcacataataggcataaggttgccaggaaatagaaatacagatactcaattcaatttgatcttcagataatcaaaaaatactttttttagtataaatatgtcccattctgtatttgggacatacatattacactgttgtttatctgaaattcaaatttaagtgggtgtcctgtactttatctggcaaccctactaaaggagctcaattaagtatttgctgacttaacagtctgaaggtctcgtttcacctgtaaaatggggctagtacctgtccctgcctctataaggttgatgggcagagtaggtggcattcagtgagccctcaatttatttgattgcctgggaccatccggtgagcagaaacccttccactttcaactacagagacgataaaaaggcctcctcgaggccagaggtgcccaggccaggcctaggtggcccgcacctgcgagcctggccagcctcttccgggtcaggtgaccgcgcgcggtcacgtgacccggcccgagtgcgggcggtggaaggcggaagtaggagaggagttcggcgccgcttctgtggccacggcaggtagcgagcgctggcgcggggggcgcggtgggctggctgcctgcacggggcgggccgggggcggcgggcggcgcggggtgggccgggggcggcgcggcccgggcgtcggggggcggcggcttcctgtgggaggggcctggcgcggcggttccggcctccgaggaggggtgtcccggctcccgcccgagtggggtgggcgcgccgcggcccgcgcgggggttgctccgaaatgggtgccccggccgccaagggtgcagctggagcgagtcctcccggaaggggagaggagcttaggttcccaggcatggagaggagcgatctttgtggagggatcgggaccaggggaaggggcgacttggaactgagctggaagggggtgcctgaaaatgggtttatggcgtggagccagagggaaaaagatgctgcctggaccccctctgagagtctctcccttccttcctgtttggaaatgattgttacccgagactttgatgacggtcccattcagtttttaaacttcaggagggatcacagaatcttgatcgtcttgcttccctcgcgcccacttagtcctgcgtgggtagggtttccacttcttgggagcctagcccttcagctcatttttctttgagattttccctgaacgggccatcatcgaggctttaaaaaacaaaaaaagaaaataaattaaaaaaataagtgtgggcactttgcctgtaaaatggcttttagcttacactgttgacctagcccagcgttacctcagcaacatagtgactgctgaaatcttggacagagaagtgtctacctagactgctttatgacttttctctttcttccgtttaaattattcagtttcccttagcttatcttgtgactgcttatcttgacgaactgwaactaggtagggtgcctgagaggtctgtgttatgttccttagaactgtgacctggatcatgattttgagattgaatacttgtgttaaagcctgttcatcttcctgtttctcatgtttactaaaatttgcagaagcaaaaggagtttcatgagtgcagtgtaactggaacgaatgttcaaactggacattcacagcagccagcatcgttttgggttacaagtaggaaaaagtactttcctaatgtattatgagttcaagtttttggagttatttgacaaacatttaaaaattagtttttgcagcagcgcctatgagtgaggttgggaagatgtattctcatttcacagggaacaaacagacttacgagagacgacttgattttttaaaacaatttattgctctttcttgtttgctggcctcttcctgctagattgcaaatccttcaagggcaggtttcatattttatttggctgctagcctagtgcctggcatgttgtgagcacttgataaatatttggtgaataaatgcatttctaaaagtcacaccggcgtaagtggtgacaaaggatttgaacccaagtcttctactctttttcttgtcagagaagcttgtgattatctgtgtcattggtccatatgaaaacaggctcgagagaaaggcttggattggcttctcagtctctttcacttcatgattactttcccatttacaaagagcgtataccaacatctcacttaaccttccctttgaaattgggatggtcagtattgtccctatatcacatgaagagactgaggcttaatgaagtccttactttagatttcagagctagtaaatgagtagggactcaagcccagacccttaatccttagatccattctttttcatttattgacacaatagaaaattttatttttattttattttgagacaggatcttactctgttgcccaggctggagtgcagtggcacaatcacggctcactgtaaccttgacctgccwgggctcgggtgatcctcccatgtctgcctcccaaacagctgggactacaggtgggtgccacctcgcctggctaatttttgtagagacaggggttttgctatgttgcccgggctgttttcaaactccggggctcaagcgatcctcccacctcggcctctcaaagtgttgcaattacaggtgtaagtcaccatgcccaactgaaagttttatttttacataatttttcaggaataaaaagtgtaacattttaaggaaaaagatcacacagaaaaagttgtgaatgtagaatgtgagtaaatgaagtttagaaaacgctgtactctaccatagcttcctcttcctgggaaaacattctttcattcagtgaatatttataagtacccactctgtctttgccaggcattgttgtagagtccagtatggtgtacactagccacatggggctgctgagcactggagctatgctgtgagcataaaatacattctggattttgaagacttagcatgaagaaaagtaaaatgtctcattgatactttttatgttatagtaaacgatcatataatgtataaacatgtatgataacattttggatttattgggttaaatacaacgtaattataaatagttggtcagacatggtggctcatgcctataattccagcactttgggaggtcaaggtggatagattgcttgagcccaggaatttgggaccagcctgggcaacatggtgaaaccctgtctctacaaaaaatacaaaaattagccaggtgcagtggcgcccgcctggctactcaggaggctgaggtgggaggatcacccaagcctggggaggtggaggctgcagtgagttgtgatcgtgccactcattgcactctagcctaggtgacagagtgagaccctgtctcaaaaaaaagaaaaagaaaaagaaaaaaagtttcacctttttgtctttttttttcccacttaaccttgacttgaaacccagcacttttttctttttaaaatgtatttcctagaaaaataaaaaattataaatgtggcttgcacttgtggctcccatcttatttctattggacaaacctgttctgaatgccaggaatatagcagtacaagaaaggtaaggatccccacccttgtggatcttcaattttattagagaagggcacattgataactaagtataatatgtattatgttgtaataaagcagggaagagggatgtaggttgcagtttaaataggatcctggccaggtgcggtggctcacgcctgtaattccagaacttttggaggctgagacgggcggatcacttgaggtcaggatttcaagaccagcctgaccaacatggtgaaaccccatctctacccaaaatacaaaaattagctgggcttgttggcacatgtgtctaattccagctactcgggaggctgaggcacgagaattgcttgagctcgggagatggaggttgcagtgaaccaagatcgcgccactgcactccagcctaggtgatgaagtgagactccgtcttgcttttggagagatggggagttgggggcgggggttctcacttttgcccaggctggtcttgaacacttggcctcaagacatcctcctgcctcagcctccgaaagtgctgagattacaggcatgaaccattgcacctggctcagtctcttaactctaaatactatccacatgctaacagcttccatatgtgtgtctagcctaggcctgtctcgagacttctagatctaattgcccacaatatcttcacgtggattcctatcaggcattttataatcaacatcaacaaaattgagccctacacctgcccctcagacagccttccccatctcagttaatgacaactccattcctccagttgttcaagccaaagaccttggagtcacccttgactcgtctcttcctctcacaccccacatccaactcagctcgtccacaaagcctactggctgtacttcagagtacaccctggatgcatctttcccctggatgatggcaacagcctcctaacttgtctccctcttccaccctggctggccttcactttctccacacaggacccagggcaagtctgttaaaaggcagggtggatcctgtccactccactgcccaactcaaaccctccaattgtcccagcttaactggagtgaaaaccaataccctacaatggcctgcaagccttccatgacctgatctctcctcccacacccaccaccaccctgacctcctctctccactcctgcttactcaatcccctccagccacactggcctcctgactggtcccaaaacctgccagtggtactccttatttggggcttttgaactctgcctggacccttaagcccctattcagccacatggccccttccttccctcacttcctcagatctttactcaaccatcaccttcagagagaggcttttctagggatcctatattttactttattatttttggagtgttgttctgttgcccaggctggagtgcaatggtacgatcttggctcactgcaaccttcacctcccaggttcaagtgactctcctgcctcagcctcctgagtagctgggattacaggcatctgccactatgtccaactaatttttgtatttttagtagagatggggtttcaccaggttggtcaggctagcctcaaaatcctgacctcaagtgatctgcctgcctcggcctcccaaagtactggaataggggttttgttttttttttttttaatctttttgaaaaccacaagctaatgggtttcttttttcttaatgaggctactcttccaactgtgcatctttatagcacccctgaaatcaatttgagtgccaatttctggaattagtctggcttcctgggttggcatccagtttaggcctccaggatggatggataatgggctttttatgtttgaaatatgtattggttttttcaaacatgtattgaatgcatgttgtttgtcaggcatcccaccattttatacatttaaccttgttgaggtgaagtgaccctcacgaggtcagatagctaagaaatgaaagagatggccatttgaatcttggtcttcagagtccacatctggtccttctaccacttatcattagtgagatgggtggagtggctatataaacataaactccctttggaatcaaatcagtgagttgcttttgakcgactttgagtcccttaggactattatgtgtcacaggcagaaagggaatttaccaggtaaagaaaggcagatttattaaagtgaaaacacgttgcaagaaagcaatgggcagcacagcagagaaggggctgtctgcaaagargcaggagatggagggaagttttacagggttgtgctggagggggctatgtggggattgatgcatctgagggctgtttgtgattaatcatttctcagaacgactgtccatggctttcccctacctgaggccccttcctcgttgttgcttacttatcttattaggactccacattatggactctgaaatttcttttctttcttctttatttgttttgcttttgagacaaggtctcattctgtcacccaggctgaagtacagtggcatgatcatggctcactgcagcctcaaccttttgagctcaagtgatcctcccatcttagccttccaagtagctgagactataggcatgtgccaccatgcctagctaatttttaacttttttgtagagatggggtcccactatgttactcagactggtcttgaactccgggctcaagtgatcctcctgcctcagcctcccaaagtgtttggggttacaggtgtgagccaccacaactggctagggctctggaatttytgaaagatgggaacaaaagggaagatgtttcccctggatgatgggacaggttagattctaaccaaaatctttttagaaggttgcagttccctgtttttcaccccaccgcagtttatagcaaatattcagtgatttaaatcattactactaataataactattaggaaaataccagccaggcatggtggctcacacctataatcccagcactttaggaggccgaggtgggtagatcacctgaagtcaggagtttaagaccagcctggccaacatggagaaaccccgtctctactaaaaatacaaaaaattagctaggcgtggtggcagacacctgtaatcccagctacttgggagcctgaggcaggagaatcgcttgaacccaggaggcggaggttgcagtgagccgagattgcatcactgccctctagcctgggcaacaagagcgaaactccttctcaaaaataattaaataaataaaaaataacaagtaccaagacatggcagtcctgacctagggcccgtcctcttcctcaagtcacccatgccttttgcttcttgttttgtcttcagatctgctttccagtcagcctcttttattcttagcctgtaattccacggggcttccaatagtgtacctccctgctccctcccgttttctctttttccgtgcttagtctttgtaaggatgtcatttggcaaagttgattctgtttgattgtttttcaatatgggcctttggagaatggaaggtagtaactcaatgctggacagaggaaggaggccaagaaagaagcattagtgttggagtagcatgagcctgtaaagaacaggagaatcttttggacagagcttttccttgcatatctttcaagaaatgagtgcaggctgggcgcagtggctcacgcctgtaatcccagcactttgggaggccaaggcgggtggatcatgaggtcaggagatcgagaccatcctggctaacgtgatgaaacccatctctactaaaaatacaaaaaactagtcaggcgtggtggcaggcacctgtaatccccgctactcggaaggctgaggcaagagaattgcttgaacccgggaggtgggggtttgcagtgagccgagattgcaccactcactccagcctgggtgacagagcaagactccatctcaaaaaaaaaaaaaaaaaaaaatagaagtgggtgcaaggtttatctctagttagaaataagctctgcctgtttctacagctggttaattagaaataaaatctttgtgaacccatggattatattgaaaaaaattttttaaaacaagaaataaaatattgatactggtgtgtaatttctgcttttccctggctccttctacacaggtcttttcatctcaagatcagtgttcactggtttcttgactcagagctgggtcaagaattttaggaattgaggtgcttgtaatgccagagccaagaatttcagtatcgagaagtggttttgtttgtagttgatatttgaagagctcttactgtgtgtcctctgctttacctgaattcatgtagtcagtacagtaatcttataaagtaagtactattattgggttcatttcacagatgagaaaactgagatttagagagggtaggtatgattttgtgaaatatatatttagtcttcctcccatttcctggcctataactcctaaaatcattgaaatctcccaagtgatcagtgtctttttttttttttttttgagatagaatctcgctgtgtcgcccaggctagagtgcaatggcataatctcggctcgctgcagcctctaagcgattcccgtgcctcagcctcccaagtagctggggctacaggcacatgccgtcatacccagctaatttttgtatttttagtagagatgggatttcgccgtgttggccaggctggtctcgaactcctgagctcaggtgatctgtctgccttggcctcccaaagtgctgagattacaggtgtgagccaccacacctggtcagtgtctttttgtgtgctaataattgacctttggttggggactcctggatagtctcaggatttgggggccagtggccagggaaaccagccttgtagttagagggttggcacttttagtcccacacccagcctctgggacagggagagggactgaaagttgacttgatctgcagtggcagtgacttaattgatcatgcctgcgtaatgaagcttccataaaaaccctgaaggactgggtttggggagcttctggatggctgcacacgtggaggttcttggaggatggcaccctcagagagggcttggaggctctgtgccccttctcacatgcctcgccctacgtctcttcatttgtatccttcataatatcctttataataaatcagtaaatgcaaataaagtgtttccttgagtcctgtgagttgctctagcaaatttatcaatcctaagaacctcgatttatagccggttggtcagaagcacgggtaaaacaacctggagcttgcaattgatgtcgcaagtcaggggcagtcttggggaactaaacctgtgggatctgatgctatttccaggtggatagtgtaggaactgaattagaggacacccagctggtgtctgccagctgcagaattgattgcttacttggtatgtggggctcccacacatctggtgtcagaagtattctgtggggctgggcgtggtggctcacacctgtaatcccagcactttgggaggcagaggtaggaggatcgcttgagcccaggagtttgagatcaacccgggcagcatagtgaaatcctgtctctattaaaaaaaaaaaaaaaaggtagtattctgtgttgtgagagtatagcaggaagaaactgagtttgctttttcctctccatcctctcagtaagtaacttgctctggatcactcaaaggcaaatgagtggttcagcttattagcctccagaagattgacaggtctgaaaggttgttgctgaggtagggtgataaaagtgatcaggtgcttcaggtattgcaggagctgccactagcttaatctgatgtgtagttgttttctcctgtcaaaagttctgtaataattattatttttctttttgagatgaaatcttgctgtgtctcccaggctggagtgcagtgtgctatcttggctcactgcaacctccgcctcccgggttcaagctattctcttgcctcagctcctgagtagctgggattacaggtgcctgccaccatgcccggctaatttttgtatttttagtagagacggggtttccccatgttggccaggctggtctcgaaatcctgacctcaagtgatccacccgcctgggcctcctaaagtgctgggattataggcatgaggcacagagcctgaaggactgtagctttgtagtaagttttaaaattggaaagtgttagtcatccaactttgttctttttcaagattgttttggcgattctgggttccttgcatttccttactttaggatcagcttgtcaattgctgaaaaacaattctctttttctctctgtttgtttttatatctggctttttggccaaggacttctgcaatgtttgttgacatttaggtgtgaagtacacatgtatgctaggacccaagtgcgggaaggtgagttgggtgggggaaattgaccttttcagtttataatgtagactttcactgtctcgctgggtcaatatggtgccttatccctattgtcaactatgcctgaagtcttgagtttggtttcacctgttgagaaactaaaagtctttttagtcttttttttttttttttttttttttttgagacagagtcttgctcttgttgcccaggctggagtgtaatggtgtgatcttagctcaccatgacctgtctcccaggttcaagctattctcctgcctcggcctatcccaagtagctgggattacaggcacgcaccactacacctggctaattttgtatttttagtaaagacagggtttcatcatgttggtcaggctggtctcgaactcccraacttgggtgatccgcctgcctcggcctcccaaagtgctggactaaaagtctgcttgggattaggaaggggcaactgcttggttgaactgggtggggaggggactctgggactctaatcattcccaagataggcttttgccagtcctcctgtttttagccccacttctgcccttactttcggaggtacctgtactactgatgcagggcacgtgagccccaaaactgggggttagtctgggtaggttcttggctttgccctggaaagaattcaagggcaagctggtagtagaagaaaacagctttattgaggcagcagagttacagctccgtgactgctcctgcagagcagggctacgctataggcagtgtgtccctagtagcagctcaggggcagttttgctgtcatatttatacccagttttaattatatgcaagttaaggagtgggctattagacatttctagaaaagtggtaacttctggggcattaccatggcattggcacactgtcatggcactggtgggtgtgtcttgtggggaggtgcttttggtgcctcttccctgtttcagccagtcttcagtctggtcctgagtcgagtcctccctcctgcctcaccaccagtgattgaccctttctggaattcttcattgccagtctgcttgccttctgttgacctctcttgtgggcagctaagtttcagtttcgacacactggaaccattttccaaaattttgctgctgtttccgttgtgtttttttccctttctgtgggttttcacctttttgtattgcttcctgtcattttgatggagtttgagaagggaacagagataaatgtatgtgtagtctgctctgtgtattgagagctcctggaaggctaagggaagaactggcctctgggaagacgctagtgtcgctactactttgtttccttagcaacagtcctgacggggagctccttcattgtattctgttcctaccgatacacgttgctccttttttttttttgagatgactctcatgctgtcgctcaggctggagtgcaatggcacaatcttggctcactgcaaccttcgcctcccaggttcaagtgattctcctgcctcagcctcccaagtagctgagattacaggcactcactaccacacccagataatttttttatttttagtagagattgggtttcactrtgttggccgggctgatctcgaactcttgacctcatgtggtccacccacctcggcctcccaaagtgctagaattacaggcatgagccaccacgcccagccaccttttcttttttttcttttgaaacagggtcttcctctgttgctcaggctggagtgcagtggagtgattacagctcactgcagccttgacctcctgggttctggtgatttcccacctcagcctcctgagtagctgggactacaggcatgcaccaccatgtctgactaattttttgtattttttgtagaaatggggtttctctatgttgcctagactggtctcgaattcctgggctcaagcagtctgcccacatcagcctcccaaagtgcttggattacaggcatgagccactacacccagctgccccagtttttcatttgcataattttctatgcaaattttttgcatttttttagttcagccaaattagctgaggtctaaagcactccttttagtgcagtcacattagttgaggtttcaacaaattcattaacagtaaaccagtggtcctcaacccagcttcatattaggatcacttggggaatttttaaataacacagctgtccctggcccaccccagaccaattaaatgggaatctctgagggtagggtttggtggtcagtgttgtttttttttaatgctccccagataattcagatgtctagaaaggatggagaaccactgctccaaggcatttgatccttcattaaggataatttaacctaactctacacattcaattacatctgttatcttattgttattctttccatcttacatttccacccaacattggcctctttccttccttgtattccccagacatgctgtcacctcaacagcattttttttttgagacagggtcttgctctgtcacctagctggagtgcagtggcgtgatcatagctcactgcagcctagacctcccaggctcaagcgatcctcccacctcacctcagcctcccgagtaactgtgactacaggcatgtgccaccatggctaatttttgtggtttttgttgagacgaggttttgccctattgttcaggctggtctcgaactcctggattcaagtgatccacctgacttggcctcctaaggtgctgggattacatgcatgagccaccactgctggccatcatacccttttatctatctgaatgttttgcagatactctcagtttcttccttcagcttcttcagatctttgctcaaatgtcaccttctcagtgagaccttcctgttcatgcctttttaatttctattttggccaggtgctgtggcttacgtttataatcccatcactttgggaggccaaggcaggaggatggcttgagcctaggagttcaagaccagtctggacaacttggtaaaatcctatctctactaaaaataccaaaattagccaggcatggtggcatgtacctgtaaccctagctactcaggaggctgaggcatgagaatcacttgaatctgggaggtggaggtgcagtgagctgagatcacgccacagcactccagcctgggtgacagagcaagactgtctcaaaaaaaaaaaaaaaagaaaagaaaagaaaaagtgaaaagcatgcaaatttatatcatataaatttacgtgactaagacctggagaaacagataatgtgtatttatgtttaggtttgatgaagagtggrcaatcgtggagaaatacgattggacaaaaggggtatgattgactggtaatacactgggggaaatttaacaagtcctatttgttcagattcttctctgtgtccttttgttttcagagaaggatatttctttccttggggtataaggagggcatctctcaaaggagggtcatatgacccgtttcaggggaaggtcagaaaatctttcataggctttatgacctgctttatgggagaagggtgagaggaagctgagagtgacttcctgcttttcctgttttcttaaatgccaaggtgtcatgttttggggtaaggtatcttaaaccccatcagccatgtcctgtctactgatgagcccatcaaggcattcttcacttctattacagtgtttatgatttctagcattttctgttgactcttatagttgctatatctctccttacattgcccatctattctcatgtgttgtctgctgtttccattagagccctgaacctagtaatcatagttattttgcattacctgtttgattattctaaaatctgtcctatctgagtcaggttctgatgcttgctttatttctttttcacactgtttcttcttgccttttagtgtgttttgtaatttttcattgagagctagacattgaccttcttcctgctgatcagttcctcttccttacccctccctagttcttgtttaaaaaagaaagctggacatgatgtattaggtaataggaaatgagataaatagtccattagtattgttagtatggtgtttcatgttaatctggctaagagttggtctgtgtttaatgattgctgtaactgttggtatctgaggcttcaaattcctctagtgtccttgtttctgtctcccctgttatctttggttttccctaaaaactccttcttaaatagagtgtatgcctttcagccctaattccctgttgttgtactggagccctgttggtgtgacagcaaagtatgggggaggggaagcattctatagcctcatggtcaaatcctagtcttttagtgggcctgtgtcccaggctatgactgtcactcatatttaactgtttttctccccttagatgaaacagaaaggctaaagagggctggagtcaggggacttctcttccaccaggtaggataaggctctggtaaagtcttcttccctggagagtaggccattgctctgggcctatttcactatggttacttcccacaactagagctaggagggaatctttcttgactctttaccaggataatcttgtaaagaaggattttttcttctgttttattcagcagtataccactagcaccaaaaccagtgcagagtacataatagatgctcaataaatatttgtcaaatgaatgaatgcctcttatctaagctctagagattgttacctagatgtgggaagtttcttaacttataatgataataggccgggcgcagtggcttacgcctgtaatcccagcactttgggaggccaaggtgggcggatcacctgaggtcaggtgttcgagaccagccttaacatggagaaaccccgtstctactaaaaatacaaaacattagctgggcgtggtggtgcatgcctgtaatcccagctactctggaggctgaggcaggagaattgcttgaacctgggaggcggaggttgtggtgagccgagattgtgccattgcactccagcctgggcaacaagagcgaaattccatctcgaaaaaaaaaaaataaaaaaaatgataataaactgatgacatttctctgaatgaaattagtccctagtgtagtatttgcttattaggttctgtagtgtttgtttaatctaaaaccctaccttagatgggattgttgtagaccagtagtctcaagcttttttgactgcaacctttagtaagacatacattttatatcttaaaacagtatatgtgtgtgtgtgtatatatatgtatgtatatttattttaaaacagtatatggatatatatatacacatatgtgtatatacaatacacatatggatatatatacacatatgtgtatatacaatacacatatggatatacacatatgtgtatatacaatatacatatggatatatcatatatgcacctattaatatatatacatgtatatttatttggtaaaactttttgtgaaataatactttcctttgtgtgtgatatacttttatattttctttttttttgaaacggagtctcattctgtcacccaggctggagtgcagtggtgcggtcttggcttattgcaacctctgcctcctgggttcaagcaattctcctgcctcagcctccttattaactgggattacaggcacctgccaccacgaccagataatttttgtgtttttagtagagatggggtttcaccctgttggcgaggctggtctcgaactcctgacctcaagcaattcacccacctcagcctcccaaagtgttgggattacaggcatgagccaccgtgctcggcctatattttcttttaaaaaaatctttttatttattatagtttggtatacaacttttatagtttctaccctattagtttgtattttatttttaaaatgcttgtcaagatttatgtagaggataagttcagaggaaatatgttgtttgtatttatattatatataaatatgttatttatatttttgagaccaagtgtggtggctcatgcttgtaatcccatcactttgggaggctgaggtgggaggattgcctgagctcaagagttccagatcagcctgaacaacatagggacccccttcatctgtacaaaaaatttaaaaaattaggtgagtctggtggctggtgcctgtagtcccagccttttagaaggctgaggtgagaggattgcttgagcccaggaggttgaggctgcagtgagccatgattgtgccactgcactccagcttggggtgacagagtgaaaccctgtctcaaatatatatatatatatatacacacacacacacacatgtatatacatacacatagatacacacacacacacatatatacatacacactcatactataaataaatatatatatatatatatatttttttttttttgagaaatttcaatagatctaccagacttagtaaagggggacattttgactttcccatccccctcccaataagtccattagtttcttcaataatgaaatactttgttcatctggtaacctttagttatattttaaacattgacccccttctccctcttccagcaaagcttatgctcactcagagttttggagtgattaggatgcaattactttccatggctattagcaggggagaaattacttgagtacgtgtacggagtcatctgttcgtgttgctgagacagagtgtgaagtctgggcctcaggtttcctaagcttcttgtagtggatagtggggatttggacctaatacgcattaggaaccttgtctaagatgggaggcaaaagctgagaggtcgaaagtactttgatggggatgggatctgttcctttctatagttacggttatttytcttgagacagagtctcgctctgttgcccaggctggagtgcagtggygcgatctcggctcactgcaacgtccacctcccgggttcaagcaattctcctgcctcagcctcccgagtagctgggattatagttgcgccaccactcctcsctaatttttgtatttttcatagagacgggggtctcaccatgttggccaggctggtctcgaactcctgccctcaagtgatccgcatgcctgagcctcccaaagtgctgggattacaggtgtgagctgtcacacctggccggttatttatttatttattttttgagatggagtctcgctctgttgcccaggctggagtgcaatggtgcaatcttggctcactgcaacctccacctcctaggttcaagaaattctcctgcctcagcctcccaarcagctgggattacaggtgcccgccaccacacccggctaatttgttatatttttagtagagatggggtttcaccatgttggccaggctggtctcaaacttctgacctcaggtgatccacctgcctcggcctcccgaagtgctgggattacaggcgtgagccactgtgcgtggccccggccggttatttttctttatgcatcaattggaaaggttttacaattccaaatgcctacattatataatgtcagggtggtatcttgctcattagatctggaactccagacaaagctctatagaataacatggattactgttatataagcagtggactgcaattttaaaagacactggagaaagaaaacatggtgatgttttatctaccctgtttctcctgccttcccagttgcctttgttccttctgagccttctttagaatttatctgattgttttagttttgcggccctgaagtgtagatcaaaaagtttggtctttcttctgttgaacaggccatgtatgggcttcaagttccattctctaagagtcaggaccaaaggctcaaaactgctacagttcaggagaacaagatagtttaaaaactaccattagttgagttgccttaggaaagaaagagtcccaatagaagtaaagatttctaaaatattctttyatttttaaagtctgtaaataatggatttccagcgtttagtgctttaacccctgttaactaaaagccccaaggctcaatttataattatttataatctttcctgcattattcaagatacgatcttttgcttccccttaaaattattgttcaattatgaaagagatcaaacatataaaatggttagagatgaagataacaaacagtcataaaaaccaccatctggatttaatgaatatgaacattttgccatatttgccccagaacttttttctttgaaagataaaatgttgtagatacagttgaggttcctttggtctcttccccactccaattcccctgctccctcctcccctaccctagagggaacttctgttctgaacttggtgtggttccttcccrtcgtacttttatacttttaaacgtttgtgtgtccacaacaacaacgtatacagttgttttgtgtaagttcaagtgtacaccaaagacatcgtactaaggctgccacttgccttttttttttttttcccctcttggcattatcatttgggatttgtacatgtggattaaattcatatatttcaggtactatatagcattccattttagaaatatatcaatttatccattcccccattgatgggtatttaagttgtttataattttttactattacaaatactgctatgatgaacatccttgaacatggcctcttctgtgtgtgttggagaatttctccctctgcaaatgcctgggagtagaatcctggtgggtccaaaattacgcgtctttaactctgccggaggttgtcagctgccatctaatgtgcgctgcctccacaggcatgtgagacttctctccaacactaattgtcaggcttctcatctctttctaatctgatgagtagcaaagagagttgatctttttactgctttgccaagacaaatttagtctaagtgagtcaaaacatcatctttttggcctggtgaaatggctcatgcctgtaatcccagcactttggaaggtggggctgggaggattgcctgaggccaggagttcaagactggcctgggcaagatggtgagatcctatctctacaaaaaataaatacataaataaataaaaaaggaaaaaaatcagctggatgtggtggcaaatgcctgtagtcccagctactcaggaatctgaggcggaaggatcactggaacccaggaggtcaaggttgtagtgagctatgatcatgtcactgcactccatcctgggtgacagggctagaccctgtctcaaaaaaacaggttggtcctrtgrtagtgggttatcagaacttattaacattagtgtcactaaagtttgtatacaacccctgaatgctaaatttggctttaaaaaaggaaaaaaaaagaactgagatgggagtctgtctgcacgttcaagggatagttgaacagtgaggaggcctgtgtggcagtaatcacagcatgatgagggtggggggatactggggagcaggaagtgggccatgaggtcagagaggggtgtggaaatgggggaaggtattgcataggacgtcaaagttcatttgcaggtctttggcttttactctttttttgtttttgtttttcaaacagggtctcactgtgtcacccaggctggagtgcggtggcacaatcttggctcactgcagccttgacctcctgggctcaagggatcctcccaactctgtggtcctgattagctgggtccacaggcatgtgccatcacactcagctaatttttgtattttttttggagagatggagtttgaccatgttgcccaggctggtcttgaactcctgagcacaaggtgatccgcccgcctcagcctcccgaagtgctgggattataggcgcccgctggcttttactctgagttagacggtgtcttagttcattttgtgtttcyataactggataatagaaacgggataatttataaagagactaggtaatttataaagaaaagagatttattctttgtatttgagtctgggaagtctaaggtggagggcccacatcctggcaagggcctttgtactccacatcccaagtggaaggaaaggcaggagagctagagagaaacgtgaggggctgaacttgcttttataacaaacctgctcttgagatagtggccccagccctgaagtaacatcaatctgccctcatgatccaatcacctcttcaaggccccacctctcaatactgttaagattaaattttcggagccgggcgaggtggctcatgcctgtaatcccagcactttgggaggctgagacgggcggatcacctgaggtcaggagttcgagaccagcttggccaacatggtgaaaccctgtctttactaaaaatacaaaaattagctgggcgtgttagcgggtgcctgtaatcccagctaccagggaggctgaggcaggagaatctcttgaacccgggaggcagaggttgcagtgagccaagatagcgccactgcactccagcccgggtgacagagcgagactccatctcaaacaaacaaacagacaaacagagggatgacattcaaagcctgagacagaatgaggtaactgagaagaggtagaacattgattgcttgaggttgaggayggggcaggagccaaccaagaaggctcaggtggggcaggaggaggatgaggcaggactggtatccccagagctgagggaaaaaagcagttaaagaacaaaagggtgatcagttgtgtcagatgctgccaataggtcagtcatgtaagaggagatggagaattgctatgggatttggtaacctggaggtctctctggagctcttgataagaagagtttggtgttgtattccatttgctaagtaccatttcagaggtttccagtggaagtaaaatgcttattacagactagtctagaaaaactagccactttaaatctttttggaaactagatatatcacataagacaaattctgttcgagtttgctaaaaatcttggagcgtgacattgtttgactttagctatggaaaatgtcaacatcattgtcacttagccatagctacatttatttaaattgaaatttaaattataaaatagagccaaggtctcactatgttgcccaggctggtcttgaattcctgcgctcacatgatcctcttgccgcagcctcccagtgtgctggaattacagatgtgagccactgtgcctctcctgtaactatatttaattctcatatgaagggcttttgtcctttttttttttttttttttgagatggagtctcactctctcccccaggctggggtgcagcggcgtgatctcagctcactccaacctctgcttcccaggttcaagcgattcttctgcctcagcctccggatacctgggattacaggtgcgtgccaccatgcccggctaattcttgtatttttagtagagatggggtttcatcacattggccgggttggtctcaaactcctgacctcaagtgatctgcctgcgttggcctcccaaagtgctgggattacaggcgtgagccactacgcctggccaagggctttcattcttagagtaatatggtgaattaataaccatgttttaaagctgaacaactctttaagataagtcaggcaccgggcttggtggtccgatcctgtatttccagctactcaggaggctgaggcagggagatactttgagtgcagaagttcgaggctgccgtgagccatgattatgcctgtgagtagccactgtactctagcctgggcaatacagccagaccctgtgtctaaatagtaataataataatattgaagaaaaaaaagaaaatgggaaggcagggagagaggtcacatacaaatagaatgacagaaggtattaatgatgttgaatagaacaggaattttggccaggcttggtggctcatgcttgtagtcccagcactttgggaggctgcggcagaagaatagcttgaagccaggagtttgagactagtctgggcaacgtagtgagaccttgtttctacaacaacaacaacaacaacaacaaaatattagagttgtggtggcacatctatagtcccagctactcaggaggccaaggtgagaggattgctcgagtctaggagttcaaggctgcactgagcatgttcatgccactgcactcccggcatgggcgacagagtgagataccatctctaaaaaacataagatacaaaggcacaagaatttaacagcatcagttctcaagtgtggtcctcagacattgggaggtctcccagactcttttagggttttgcaaggttaaaactcttttctttttctttctttctttctttcttttttttttttttttttttgagacggagtcttgctgtcatcgcccgggctggagtgcagtggcatgatctcggcgcactgcaacctctgactcctaggttccagcaattctcctgcctcagcctcccaagtagctgagattagaggcgcccaccaccatgcccggttaatttttgtatttttagtagagacgaggtttcaccatgttggtcaggctggtctcgaactcctgacctcaggtgatccacccgccttggcctcccagagcgctgggaatacaggcgtgagccactgtgcctggccgaaattattttcataatgacattaacactttgccttttcactgtgatcccattcacaccaatgttccagaagcaaaggtgagtaaagcagttggtgctagcaccaattgggctgttgctgtggtcatggtatccttcaccacacatactctcagtataaagaaaagaaaaagccaggttcgcctgagaatgtccttgatgaagtggtaaaattcattaattttatgaagtcttgactcctgagcacgtgtttttaatattctgtgtgctgaaatgggcagtactccaaaagctcttctgccgcctgttgaagtataatggtgtgttgggaaaaagcacggttgtttgaattgagagctgaattaattgctttttgggtgaagtaccatttttacttaaacatctaacagacaaatgtgttactagatttgggtatttggcaagccttttcttgaaaacgaatgaagtgagcccgacacttcaaggaaaacaacacagtatttgttaccaatgataaaatatgagttttttttttttttaaagaaaagaaagagtggtcgagtgcagtggttcacacctgtaatcccagcactttgggaggttgaggcaggcggatcacttgaggttaggagttcgagaccagcttggccaacatggcgaaaccccatctctactaaaaatacaaaaattagccaggtggtgctggtgcctctaattccagctacccatgaggctgaggcacgagaatcacttcaacttgggaggtggaggctgcagtgagccgagattgtgctactgtaccactccagcttaggtgtgtgagactctgtctcaaaaaaaaaaaaaagacaaaagacaaggtagtagagatgatggaaggagggaggaaggggagcggatatgagtttttaagtgaaaggttttaagggaaagttagacttttggaatgcttttatctactaccaagagctcaatggcttcccaatgcttaaagacttgtctgatgagatcagtggtgacattcacaaatgtgatttttggatattgcataatgaaatgtgtcaacatttggaaaatctgcagaactcaatgaaccaatatttttcaaatgtcaaatgatgatattccaaaatcacatacaagtaaaagatccattcaaagtacaagatagacttgcttctagccaagacggaatgacagggacacctcatggcgaatgatgctgcacatcttttttttttttttttcgagacagagtcttgctctgtcacccaggctggagtgccatggcacagtctcggcccactgcaacctccacttcccgagttcaagcgattctcctgcctcagcctcccgagtagctgggattacaggcacccactaccacgcccgacaaatttgttgttttttagtatagatggggtttcatcattatggccaggctggtcttgaactcctgacctcagatgatctacctgtcttggcctcccaaagtgctgggattacagaccatgagccactgcacccagcctacccatttaaataattgtattagttgtcttctttttctctttcctttttttttttcttgcattatacttttagcaaggattactgtcagattctactcatttggccagagaccctccttgaggtgtttgcagcaaacttgctctacagctagcacactagattagctgtctttctgctgtgaatctgtgatgttctttttggagatgtctttttttttttttcttctttttttgagacagaatcttgctctgttgcccaggctggagtgcagtggcacgatctcggctcactgcaccctccacctcccgggttcaagcaattctctgcctcaccctcctgagtagctgggattacaggcacccaccactatgcttggctaatttttttgtatttttagtagagatgggatttcatcatcttggccagactggtgttgaactcccaaccctgtaatccacccgcctcccaaagtgctggggattacaggcatgagccactgcgcccagccaatcttttttttttttttttttttttttttgagatggagtttcgctcttgtcacccaggctgcagtgcaatggccgatcttggctcactgcaacctccgcctcctgggctcaagtgattctcctgcctcagcctccagagttgctgggattacaggcatgcagcaccatgcctggataattttgtattttttagtagagacggggttttgccatgttggtcaggctggtctcaaactcctgacctcaggtgatctggccatctcggcctcccaaagtgctggaattacagacgtgagcgaccatgcctggcagaggtgtcttagtagactctgcctcctctagactttgctataacagtcctgtgtcctttctagtctatcctaagacctgtccaggttcattaagtcattataagacaaactatacgctggttgcagttgcttggacgtttctattttcttgcctgtttctttaagcttaaatattgaaattgagttaaactcctctgtcttcttatcagatattctctgaattcttttttctgtttgtcttacagcttcacggtgatgatatggcatctgccagctctagccgggcaggagtggccctgccttttgagaagtctcagctcactttgaaaggtgagtggcactgtataatgtcttcatcttgtctacgcccagggaagagggagaatctaaccacaccttggtctggggagccaaattttgtgaaatagtttacatgtgttaattatttattctcatgggattgtcatcttgtagctgtaattcttgaagaagaaagaaaataaaggagcaggaaaatagggaacttttagctaaaattgtctaaaatggtgatttcaggccaggtgcagtggctcacgcctgtaattcagcactttgggaggctgaggcaggaggatcccttaagcccagagtttcaagaccagcctgggaaacatagggaagccctgtctctacagaacataaaataattagccaggcatagtggtgcatgctagctggtcccagctactaaggacactgaagtgggaggatcgcttgagcctgggagttcaaggctgcagtgagctgtgatcacaccactgcactcagcctgggcaacagggtgagaccctgtcccaaaaacaaattaaaataaaaactgaataaaataaaatggtgacctgttcatgccctagggctcgttgctacctgcactcgctccctaggtgcttcttccaacctctggctttaaatgccaccaatagaagatcactcctctgggctttacctctgaactcctgatttataaccagtagccagtttgttaccttcacttgaatatttagtaaacatctaaaatttagcctgtctatagctgaggtcctggtttttcttcctcattgtctgtatcaacccatcagcgtatctggttgactcgatcttcaaaatgtgtcactcaacattcagccacttctcaccacccctaggtcccagcctagtccaggccaccattgtctccaccctgagttaaggcagtagcctcctgtcctgtctctcggcttctgcactttgccctccttcagtctgttggtcacacagcagccagtgatcttgttaaaaggtaaactggggccaggtgtggtgactcatgcctgtaatatcagcactttgggaggccaaggcaggaggatcacctgagcccaggagtttgagaccagcctgagcaacagagcaagacccccgtctctaaaaaaaaaaaatcagaggctgagacaggaggatcacttgagcctaggagttcgaggctgcagtaagctgtgattgtgccaccgcactccagcccaggcaacagagcagagcgagaccatgtctcagaaaaaaaaatgtaagctgggtcttgtcactcctctgctcaaaccattcaagggtgctccatttcacagtagaagccgaagctcccatgtgatgtgacccttccccaccccacatttctcatctcctgttcctggtctacattctctgtgccccagcctccttgctcttcagtgaatacactgggcaggcgtctgcctctgggcctttgcacttgctgttccctctgagtgaaatgcttttcgcttcattatttccttaggcgttttctcaaaagccaccctcttcctgatcccctgatccaacgccacctttctcattgacttcatcacatctatttccctctcttctttatatttttcttatcagcccttgtccctgtttaattaatttatttcatttgttgactgtctccttcaatagagtgtaagatccacagtaagagatttttgtcrctttggtcactgttaactaccccagccagtagaacagtgcctgacacatagtgggccctcagtaaatagtgcctgaacgaaagaatattgcttcgggttccatagctctgcagccatcacagatgggagagtggctctcagtatctgagctcagacccctcagcctggtcctccagaggcaaaattgtgtctcttgggaatatttttcttgagtatttttgaaatgcaaatgttatttatataatatactcatggagtttaaaaatcttagtttttaattttattattattatattttgcgacagagtctcgctctgtcgcccaggctggactgcagtggcgctgtctcggctcactgcaatttcttcctcccaggttaaaacagttctcctgtctcagcsttccaagtagctgggattaccagtgtgtgccaccaggcctggctaacttttttgtttgtttgtttttttgagatggagtctcgctctgttgctcaggctggagtgcagtggtgcgatctcgactcactgtaacctccgcctcccgggttcaagcaattcttctgcctcagcctcctcagtagctgggactacaggcgtgtgccaccgcgcctggctactttttgtatatttagtagagatggggtttcaccatattgggcaggctggcttcaaactcatgacctcatgatctccccgcctcggcctcccaaagtgctgggattacgggcgtgagccaccgtgcccagcctcctatagttcaraattctttcctgcagtccttcagtgctcctccttggaaaaaaccagtattgtttcttgtgtgtctcttccaagatacaccaaaagggatgcatttttgtaattttgagagccagattgccttccttggaaggaatacccttctagcaatgtgcgagagtgcctgtttccctacatctttaccagcacaatgttgtcagacttttaacttttgcctgtttacattggtgcaagcttgtgttctcagtgtagttttatttcccacttgtttacttacgcatttgatccttgaacagcatgagggtcaggggtgctgattccctgctcagtaaaaaaatccacatgtaacttttgactcccccaaaactttactaacagcctgctgttgactgaaagccttgccaataacagaaacagttgattggctgggtgcggtggctcacgcctgtaatcccggcactttgagaggctgaggcagacagattccctgaggtcaggagttcgagaccagcctggccaatgtggtaaaaccctgcctctactaaaaatacacaaaaaaattagccaggcgtggtggcaggcgcatgtaatcccagctactgggaggctgaggcaggggaaccgcctcaacccgggaggccgaggttgctgtgagccgagaccacaccattnnnnnnnnnnnnnnnnnnnnatgcatttaaaaatataccttaaaacaccaggatcacactgtgggcaggcacaagggaactggaaaccgcgcagtcacaccccacaggttacactatcagctttcttcatgaaatgcacgggaaaaagaaccacctacgctatttaaatggttatttctctctttctctttccccccaccattttcctgaatggtattaccaaatctgtgtaggttaaatatgtgtataatgagatacaccagtattatcaagctggctctttccaccctggtaagaaaattcaccttcaagaaaggcaacaaaaaagcctttagaagtatgtgctggacaggtgcagaggctcacatctataatcccagcaccttaagaggccgaggtgggggccaggcacggtggctcacacctgtaatcccagcactttaagaggccaaggtgggagaactgcttgagtccaggagtttgaaaccagcctggacagcacagcaagacctatctctataaaaaaaatttaagaattagctaagtatggtagtgtatgcctaaagtcctagctactcaggaggctgaggcaggaggattgcttgagcctattttgaggctgcagtgagctgtaatcatgccactacattccagcctgagcaacagagaaagactgtctcaaaaaaagaaaagaggccaggtgcagtggcttacgcctgtaatcccagcactttggcaggccgaggtgggtggatcacctgaggtcaggagtttgagaccagcctgaccaatacggtgaaaccctgtctctactaaaaatacgaaaattagccgggtgtggtggcaggtgcctgtaatcccagcttctttggaggctgaggcaggagaattgcttgaacttgggaggcagaggttgcagtgaaccaagatcacgccactgcactccagcctcggcgatagagcgagactccgtctcaaaaaaaaaaaaagaaagaaaaaaagaaaagaagtaagtgtgcgtggctgaataacatggccccaaaacagagacctcaggatgttaccaggtccaataggccaacttctgctttgacctagacttgctaattattagctaaggtaataaagtctgtagcccccagtttaaaaccatattagttcactctaactcatctccctactcaaaagggcagaagcaaggcaaaagactccaagaaatataattaaaatatttcaagactacaaaaacaatcaataatgtaataagaaacaggcaaagaacatgaacaggcaatccataggaaaggaaatacaaccgcccttaaatatataagatgctaaacactggccgggtgcagtggcttacacctgtaatgccagcactttgggaggccgaggcaggtggattagctgagttcaggagttcgagaccagcctggccaacatggtgaaagcccatctctactaaaaatacaaaattagctgagcatggtggtgggtgcctgtaatcccagctacttgggaggctgaggcaggagaattgcttgaacccaggaggaggaggtcgcagtgagccgagattgtggcattacactccagcctgggcaacaagagtgagactctgtctcagaaaaaaaaaaaaaattataaattttgttatgttcccaggctggtcttgaactcctgggctgaagcagccctcccaccttggcctcccaaagtgctgggattccaggcatgagccgccacgcccggccttagctgttgtctttacaccatgcgtttttaacccatggatttgcaaaaagtgaacaagcatatcccttagcactctgtgatgtctggtaaaatgaatattctcctgtagcactgatgggaggctacatgggtttacctttcttggaaaggaatgggcagttttaagaactttaaaaagtgttcrtatcctttggaggaatactcaagaaaggcatgcagatgtatatgttcacggtaatttccccagagcgaacaattgcaagcagtctattcgacaatgaaagaatagttaacatatacctattatgggcttgtattgcagtcatttaagagtgacttatgggggtgaagaatttttaaagaattgaataaataaannnnnnnnnnnnnnnnnnnntgcctttcttgaaggtgaattttcttaccagggtggaaagagccagcttgataatactggtgtatctcattatacacatatttaacctacacagatttggtaataccattcaggaaaatggtggggggaaagagaaagagagaaataaccatttaaatagcgtaggtggttctttttcccgtgcatttcatgaagaaagctgatagtgtaacctgtggggtgtgactgcgcggtttccagttcccttgtgcctgcccacagtgtgatcctggtgttttaaggtatatttttaaatgcatcgaggcccttaaacgtaggacagctattttatttgatattttactagagaaacactgaaaaactgatctctgaaaagcatagtataataaaacaagaaacaagctgtttggaacttattgagagagcagatgccagactctattgtggtcccttcttaagagctttttcagtgtataattttgtctttatatgatttttgcctgatttgttgactttaaaagctaaatctcacataaagtcgtgactctgtgtataaagatatatttcatgaaagagactttctagataaacttgctcatatctttattttagcctgtcttttaagaacaagaaatattcaaaatatcaccctgctgattaactgtaggttacaaatgtgtcagtggagagacctggccaactccacattaagcagatgttcaaacttagtatccccaatggcaggacaacctaatgtatgtggtaagaggtacacgacataacttatgtagtattcttctttcttttgagtcagggtctcactctgtcacctaggctagagtgcagtggcacaattacagctcactacagcctcgacctcctgggctccagggatcctcctatctcagcctctcgagtaactggaactacaggtgtgagccactacacctggctaatattttattttttgtagatttggggtcttgctgtggtgcccaggcttgtctcgaactcctgggctcaggtggcccttctgcctcggcctcctaaagtgttgcaattacagggtgagccactgtgcctggcctttaaaccgaatctaatcatgaggaaacaattgtaatcacccagtgggttcttcttgcccactgcacagataaaataaattcactgctgggcgcggtggctcatgcctgtaatccgagcactttgggaggcctaggtgggatcatgaggtcaggagttcaagaccagcctcgccaagatggtgaaatcctgtctctactaaaaatacaaaaaaattagctgggtgtgatggcaggcgcctgtaatcccagatacttgggaggctgaggcagagaattgcttgaacctgggaggcagaggttgcagtgagtcaagattgcaccactgcactccagcctgggtgacagagcaagactccatctaaaaaaataataataataaataaataaattcactgggactgtagcattgcattagagaaagagtttaattgacacaaaacaggccatatgggagacagagttatcactcagatcagtcttcctggaggctcagagattagggtttttatagacaatttgacaggtaggggactagggaatgggtgctgcttattggttggggatgagattatagaggtgtggaaaatggtcctgtgctgagtccacttctgggtggggccacaggataatttgtttcacgagtcaagtcacgggcccaggcaaagtcagtagattgccagaaagaaaaaatctcaaaagaccaaccttaggttctgcaatagcgatgttatctatgggagcaattggggaagtcacaaatcttgtgacctctggcttcatgactcctgagcagtaagggattatagaaactatacctacctcttattagaattcaagcccctcccataatcctaaccttgtggctgttgattagttttacaaaggtggtttcgttttgggaagggctgttattatccttgcttttttttttttttttttttttttttgagacagggtcttgctctgttacccaggctggagtgcgttggacaatctcagcttactgcactttctgcctcctgggttcaagcgattctcgtgtcttagcctcctgaatagctggaactacaggcgtgcgccaccacgcccggctaagttttgtacttgtagtagagacggggtttcaccaagttggccaggctggtttcaaactcctggtctcaagtgatctacctcccttagcctcccaaagtgctgggattacaggcataagccaccatgcccagctatccttgctttaagattaaactataggctgggtgtggtggctcatgcctgtaatcccagtactttaggaggctgaggcgggtggatgactttgagctcaggcttaaagtttgagaccagcctgggcaacatggaaaccctgtctctacaaaaaatacaaatatgagccaggcatggtggctcacacctgtagtcccagctacttgagaggctgaggtgggaagatcgcttgagccccagaggtggaggctgcagcgagatgagattgcaccactgcactccagcctgggcagcagagggagacccggtctcaaaaaaaaaaagaaactataaactaaatttctcccaaaattagcttggcccatgcccaggaatgaccaaggacagcctagaaatcagaagtaagatggaatcaactatgtccgatttctctgtcataattttgcaaaggcagtttcacaattagaaaaatgtagaatttgctgcattctttaaaacagctggtggaagtctttaaaaatcattgttgccttggcaaagctgctgggattataaaagaaaaaaaccaaaaagttaaacaaacaaaaatcattgccatggaaaagaagggaggatgttctagattttaaaagattaaggagatagtagccacaggcaatttgtatatattgattaggtactgaattgggggaaaaatggctttaaaaatatgtctggggactgggcagtagctcatgtttgtaatcccagcattttggaaagctctggcgggtagatcgcttgagtccaggtggattccttgagcccaggagttcgagatcagcctggccaatggggtgaaatcccgtctctacaaaaaaaattaaaaagttagccaggcgtggtgttgcgcactggtagtcccagctactcaggaagctgaggtgggaggatcgcttcagccaggtaggtcgaggctgcagtgagccgtgatcgtgccactgcactccagccggtctacaacttactttttaatggttttacctaggaaaaaaaatgcggatacacacacacacacacacacacacacacacacacatacacagagacatagatggcatttatctataacctttggtgtccaatagaatagtcactgtagccacatagaactgtttacacttaaattacaattatataacatttaaaaatcatatccttatttgcactagccatatttcaagtgtcaatagccacatgtgtctcatggcaatgtattgggcagcacagatgtggaacattttcgtcatcatggaagttctcttgggtagtgatgctatagacacatagaacagaaagcaaatgtggcaaaatgataacaattggtgaagagtatacagtatttattgttctatttcaatttttctatagattggaaacttaaaaataggaggttttttttttttttttttttttttttttgtgagagtctctctccatcacccaggctggagtgtggtctcagctcactgtagcctccgcctcctgggttcaaacagttctcatgcctcagcctcctgagtagctgggactactgttgtgccccaccacgcccagctagtttttgtatttttggtagagacagggtttagccatgttgcccaggctggtctcaaactcctggcctcaagtgatctgcctgcctcggcctcccaaagagctgggattacaggcgtgagccaccatgccctgcttcaaaataagagtactaaatgccaatatgatcctagattggggcctggaccagaacaaatttttttttctttctttttttttttgcgatgatgggcatcgataggacaattggcaaaatacgaataaagtctgtaaattaaatattagtattataaaaagttaaatgtcctgattttgataattgtgctattggttatgttaaaaaatgtgtttgttgggaaatacacccagaaatatttaggagtaaaggggcacaatgtctagagcttactctcagagtttcaggaaaaagtgtgtatgtgtatgagcgcagatacttctcaacttacagtggggttacgtcctgaaaaacccatcataagttgaacatatcgcaagttgaaaatgcatctgatactcctaatctgccgagcatcatagcttagcctagcctaccttaaatgtgctcaggacacttcgatatcccgcagctaggcaagatcatctggtgaaggggtacacggcagagtatcaattgtttgcccctgtgatcacgtggctgactggtgttgcggctcactgccgctgcccagtagtaccgcatatgactattctgcgaaaagaccaaaattcaaaatttaaaatacagtttttactgaatgcatatcgctttcgcacccctgtaaagtcaaacgtcctaagtaatgcaccatttgtagtccctattttttaaaggcatgtagattcatgctcttaccaccaggtggcctcagttaaccttggtccgtgtgtaaatcactgcacctcatttttctaccctgggccatgcctcagtaccacaaacctttgtccctagtactgttcccttgtcgcttctgaatcttagccacagctgattttttatctgttgtcttcctcccttctgttcctttggggccagaggaagatagttactgctataaaaaatctgaaggtgaatttggcctttgccaagttgtagacaccattgtaggactgtcacctttcagaagagtctgggagggagggatttgcttatactcaaacagggaagctcaggctaggatagacttgccattacaggcaagggagcatcagttgtatctctgatttggggcaggatgggagacgtctagatgtgttttaccctagcgacctggcgtttccaccaggggtaatatacactaggatgtctgtctagctcctcggtgtgatgcttgtgtagctttgtactccatgagtctttggcttgctggtcccaaacgaacatcagaattgttgccacatgaaggctatgagcggaagaagaaatgtagatgactaacgacacatggcaaaaatattcaaccttgctggtaatcgaagaacagcaatagaacaaataagtaaagttcaataataatatgcagcatgatgtggaatcagaccggccgggtgcacagtctggcttgtagctccctggctatgtagagtgggagagtgaccttgcctctcaagcctgttttctcctgggtaaaatggggtgatgatatattccctgcctcatgggtttgttgtgaggattcagttagaaaatgtatgcacatggcagagggtctttaataagtactcataaaatcttaaatattatctttatttatttcagttaaaatttataaattggccaggtgcggtggctcacgcctgtaatcccagcactttgggaggccaaggtaggcagatcatctgaggtcaggagtttgagaccagcctggccaacatggtgaaaccctgtctctactaaaaatacaaaaattagccaggcacggtggcgggcgcctgtaatcccagctactcaggaggctaaggcaggagaattgcttaacctgggaggcagaggttgcagtgagccgagattgtggcattacactccagcctgggcaacaagagccaaactctatctcagaaaaaaaaaaaaaattataaattttgttatgttcccaggctggtcttgaactcctgggctgaagcagccctcccaccttggcctcccaaagtgctgggattccaggcatgagccgccacgcccggccttagctgttgtctttacaccatgcgtttttaacccatggatttgcaaaaagtgaacaagcatatcccttagcactctgtgatgtctggtaaaatgaatattctcctgtagcactgatgggaggctacatgggtttacctttcttggaaaggaatgggcagttttaagaactttaaaaagtgttcgtatcctttggaggaatactcaagaaaggcatgcagatgtatatgttcacggtaatttccccagagcgaacaattgcaagcagtctattcgacaatgaaagaatagttaacatatacctattatgggcttgtattgcagtcayttaagagtgacttatgggggtgaagaatttttaaagaattgaataaataaaagatgaaaatctggaaggcaatttaccaacgataaattggtgatgatgatcactggcagttatcccagtggtttcaggttagggattttttttttttttttacacttcatattttttttggtgtgtgtactcacatttctttaaaaagtttttagaatcaagacaaaacaaaatgtattgatttattttttaaagcaataactaaaaagagccggaacatctgccacaggggggcatctgggagccctgggactcatctttgactttttctttctttctctcccagtggtgtcygcaaagcccaaggtgcataatcgtcaacckcgaattaactcctacgtggaggtggcggtggatggactccccagtgagaccaagaagactgggaagcgcattgggagctctgagcttctctggaatgagatcatcattttgtaagagaaagccccttctttttgaacgcagcaagatggggaaagagagagggtgctccgagggggttgtgggaggtacagattccctgtggcacctccgactttttctacctatggtacccaaggtgactctttttaggtgttcctacaccattgagctcatagagcgttcattattakctagagggttacagggtcagctttgagaggggaaaggatatatgtgggtgtctgcctgttttggttccccctycccaagatgtcagcagtttagtttaaatgttttcttctaagttataggaatgatctgcttggatgtaatgaatcaggtatttgtttttcaggaatgtcacggcacagagtcatttagatttaaaggtctggagctgccataccttgagaaatgaactgctaggcaccgcatctgtcaacctctccaacgtcttgaagaacaatgggggcaaaagtacgtatgatgaagggggtgccgacgtgattcttgggtggggatgggaggacctggcagatcamcctggtattgcaatttcccccaggactaggggctgcagtacctctgttctccttggatgctgtctttggagttttgggaaggctgagggctcctctctgcctccactacagagtttagccctctttgtccagggcctctagtaatgtgatgcagtggtgtgttgccctttatccttccttagggactggaaactttctgtctgcctctgctcctcttcccgttgcaggagatgtgtgatatgttgaatgaaactgtcaaatacctctagcctaaatcattgcttttctagcctcagccctaaaacagaacaaaggagctgtgtgtatacgtatatgtgtgtgtgtgcatgcctgtgtgcatgtgtgcacgtgtgtgtctgggatagtattacaaatagtgccctgtgcttactcggcactcagtaaacatttactggatgttggaacgtgatggacgcgccatctgaattagccaacgtgcctctacgtcacggacatataaatcctcatctatttattgctgtttgtggtcagtggcatggcccatggcggtggtattggaccctccttcataaggcctctattcagagcagtaccatatgtggcgaatgaatggcatggaaagaaaggctcctttttctcttgatatctggaaagtattttctgaaagtggatgtagcttaagagagaggtgggggcggggagagttgcgtcccagcgagcgtgttacatgatttaagagtctttcttttctctccaagcctgtccttttaagcgatgggccacttgaaaggtctttgagcctcctctggtcttttcttttcggctgggcacatagagatgtgctgaacccacactggcccgaggaattgtttaaaaccagagatgtgcctccactttaatcctgcagagaactccctgattgctttgtcttctgaattggtgtttattttcccaaaccctagccagccttttgtaatttgatcatcagggagaattctatttattgcaatatttggaaatatacttgtggatagcctcacattaggatgcagcaaccagcatgagggtccttttttcctcttcatttgcccagccaatatacttttgcttttggttagcaaaagtccttgtagaaattgtaaattacagaaagaaaacaaaatttgcccctaagcacagcacctagtaatagttattgttttttcttttttttttttttgagatggagtcttactctgttgcccaggctggagtgtagtggtgcaatctcggctcactgcaacctccgcctcccaggttcaagcgatcctaccacctcagcctcccaagtagctgggattacaggcatgtgccaccattcccagctaatttttgtatttttagtagacatgaggtttcactgtgttggtcaggctggtcttgaactcctgacctcaggtgatctgcccgcctcatcctcccaaagtgttgggattacaggcgtgagccactgcacccagcctgatagttattcttaatgtttttttaaaagcaattttatggccgggggtggtagctcacgcctgtaatcccagtactttgggaggctgaggcgggtggatcacctgaggtcaggagttcgtgaccagcctggccaatatggcgaaaccctgtttctactaagaaaaatacaacaattacccagggatggtggtgggcgcctgtaatcccggctactcaggacgctgagacagaagaatcgcttgaacccgggaggtggaggttccagtgagccgagattgcgccactgcactccagcctgggtgacagagcaagtcttaaaaaaaaaaaaaaaacaattttactttaattaattaatttttatttttatatatatatattttttgagacaggtttctcactttgtcactcaggctggagtgcagtggtgcaatctcggctcaccgtagcctctgctcctgggctcaagtgatcctcccacctcagcccccacccctagtagctgggactacaggcacacgccaccatggcctggctgtatttcatatttttagtagagagtaggtctcactatgttgccaggatggtctggaactcctgagctcaagtgatccgcctgccttggccttccaaagtgctgggattacagatgcgagccactgcgtctggccaattaattaatttttagattgagatgggatctccctatattgctcaggctggagtgtagtggctatttataggcacgatcacagctcactgtagcctcaaactcccagcctcaagccatctcctgcctcagcctccggaatagctggaaccacaggcgtgcaccactatacctgactactgttaacattttgatgtatacatttttgagcttttaaattttatcttttaaataattttttcccctcagatccttgttctgatctttttttatatttgtagacgtatattgatgtttatgacatcaatgaaactaaattgagattatacatgaacatattattttgcaatatgcctttttctctttaaaaatgtatcaatatatatttatttttatttatttatttttttttctgagacggagtcttgccctgttgcccaggctggagtgcagtggcgcgatcttggctcaccacaacctttgccttctgggttcaagcgattctcctgcctcagcctcccgagtagctgggactacaggcacccaccaccatgcccggctaatttttgtatttttaacagagacagggtttcactatgttggccaggctggtctcgatctcctgacctcgtgatctgcccgcctcggcctcccaaagtgctggattacaggcatgagccaccgtgccyggcctatatttatttttagttgtgataaaatacacatgatgtaaaattaatcacgttaataatttttaggtgtatagtttagtggtgttaagtacattcaccttgtacaaccatcaccaccatctatccccagaactcttttcaccttgcaaaactgaaattctgtcccattaaaccatgactcccccatcctcccctcgcaccagcacctggcagctaccgctctactttctgcttctgtgaatttggcttttccaggtagcttatgttagtggaaccatacagtatttgtccttttatgactggcttatttcagtcagcataatgtcctcaaggcttattcatgttgtaacatgcgtcagaagatttttctttccttttgtttttttttttttgagacagggtctcgcactgtcgctcaggctggagtgcagtggcgcgatctcggctcactgcaacccctgtctcctgggttcaagtgattctcctgcctcaagcttccaagtagctaggattatgacaggtacctgccaccatgcccggctaatttttttatttttagtagagacgggagtttcaccatgttggccaggctggtctcgaactcctgacctcaagtgatctgcccaccttggccttccaaagtgctgggattacaggcataaaccaccgcatctgkcccaagatatcttattatgtatgtgcaaatataccaaaatctgaaaaaatctgaaatccaaaacacttccagtcccaagcatttcaaataaatacttatgagacctgtacaatttaccttcccatcagcagtggctgaaatttctggtttgtattgtaccttggcatatattggatattacttgtaaaaaaaaaaagcctttttttttcctatttgataactattaacattatgatggatttgcttttcctgtttctttttggctgaattatttttattttcttattttttacttttttgctctgatctcctggcctctcaataagaagtattttaaagtatattctagacgtcctgacattttatcctagattcttcagcatgcatcttgttaaaacaggacattttctttattttaattcttctacttttttctattttttttttactttggaacatttacataaaaaaaacattatcttacacaattactgtatcgttatcacatttagcaatagtgacatgaattcctatttatgtctaataacctgttcatagtttcaccatttttctcaacatgtcgttttgcagttttacatttggtttgcttgaacctgggtttgggaaggtccattcattggttgttctatctctgaggcyccccacttccaccctgcttttttgtgtgtgtgtgtgaaagcaaatttgttaagaaagtaaaggaaggcagggcgcagtgacttacacatgtaatcccagacctgggaggcggaggcaggttgatcacctgaggccaggagttcgagaccagcctagccaatatggtgagaccctgtctctactaaaaatgcaaaaattagctgggcacagtggcgcacgcctgtaatcccagctactcaggagtctgaggccggggagtcacttgaacctgggaggcgaaggttgcagtgagctgagattgtgccactgcagtccagcctggatgacagagcaagactccgtctcaaaaaaaaataaagtaaaggaataaagaatggcagagcagcctccaccctactttttaaagctgtgatttgttgaaggctactgaaggattaaaaaaaagtgtttattgccctattaatgtcctttgctcatttttatattgaagtgtgcatttttctcttttggtattgaaagaactctttatttgttaaggttattattcttcgtcttaccatttgtaaatgtttttctagtttttcatttgcattctaactttgtatgtttttaactttctgtagtccaatctgtcaccctttatgttttcagcattttctttcatgctttggaaggcattcccccttctgagatgaggtaaatggtcacctctattttttcctaggtgtttatgattttattttttcctgggtgtttatgattttattttttcacatttaattctgcatccacatgagtttatttttgtgcccagtacaaatagggatctaattcatttttttccctaatatgtagctgattggtttagcactacttattgaataatccatctgtttccccaatgacttgagttgcttcagcttatattaaaaacatatgtgtatttgggcctgcttagggactttccattgaatccatcgttttattagcctttccaaatcactctgtctatgctattgtaaaattatgttttaatatctggcagttaagtttctcttttttttcaaagtcttcatgcttcttttctttgcatatatcacatcactagatgaaccttaacagtttcatcagattctctcctcttcctactccccatgccccctaaaaaatctcttgagattttatggagtcctgtcatatgtaaagttaacgtaatggggaattttcatactgaactccccacataggaacatggaatgtttctaaattaattcaaataattttgaagttatctttaaatagattccactttaaattttaaaaacctttggtattattttcagtgggatcttttcttattctgtcttctaactcagtattgttggtaaatggctgtttctgcattttcttttgtaatctgtcagtttactgagtcctttagtataggtttgcagtagtttcttttgagtttgcttggtagactttttttttttttgagatggagtctcactctgtcacccaggctggagtacagtggcatgatcttggctcactgcaatctccacctcctgggttcaagcgattctcgtgcctcagactactgagtagctgggattacaggcgcccaacaccatgcctaatttttgtatttttggtagagacggggtttcatcattaaggccaggctggtctcaaactcctgacctcaggcgatttgcctgcctcggcctcccaaagtgctgggattacagacgtgagtcactgcgcccagcctgcttggtagacttttatgtgggttgtgacactgataattttgttaatcctaagagataattatatttctattttgtgttagttgctttgcataaaactttctgttttagtggtgatagagaaatgccctctagtaaataacttctaggtgtaaggctgggtattagtaacctttttgctttcttcttctttttttattttattttttggcacctttctgactgggaatctttttgatttattaatcattgcaggttaaaaaaaaagtcaggaaggatgttgagtttttttttgagacaggatcttgctttgttgcccaggctggagtgcagtggcatgattaccactcactgtggcctctacctcccaggctcaagcaatcctcccatctcagtctctggagtagctgggactataggtgtgttactaatttaattttttttctttttttttttttttagagatggtatctcactatgytgcccaggttgggtgttgactttgtatcaaatatctattaagcagccattggaatgattatatgatttttcttctttaaattactatattaatttctacaactgggcacagtggctcatacctgtaatctcagcactttgagaggctgaagcagaaggatcacttgaggccagtagtttgagaccagacagggaaacatagcaagaccctgtctctactaaaaattaaaaaaaaaattagccaggtgtgatggtgtacgcctgtagtcccacctacttgggtgactgaggcaggaggatcacttgagtccaggattctgaggctgcagtgagctatgattgtgccagtgcactctaggctggacagcagagtgagaccctgtctctagaaaagatttttaaaaatctattatatgaatttcctaatagtaattatcttagaatttctagaatatacctagttgctcaagatagactattccttgaaaattttgttagaattgtttgttaatattttatattggggttttccatctatattcgttagtggtaatttgtctgtagctttggtctatttttgtcagctttggaatcaaggccaagctaattttataaagtaaattgatgtgctttccaactttgggaacagtctctataacatgggaattatctgttccatgagtgcagcaaagagctcacccataaaaccaactgggtctggcatcttgctttgaaataattctttgatgactttttttttcagttttcccccccataattactggtttgttcagcttctttgtttcgtcttgactcaattttgttaactcatttttttctgagaaaatcggttcatgagattttcaaatttattagaataagggttttaaatatcattctcagtttaaaaacgtctgtaatattttttactttaaattgttgctatttgtgtgtttccccagtttttttcttgactaacttaaacatttttgtttttcatttttgcttttaaatttacttttcatagaacaacttcttggatttgtcagataccatattttgtaatattaatttctgtctttagctttattaacttttctactatttgccctagatctgttttatttatttatttatttattcattcattcattcattcattcattcattcattcattcatttatagcttttcaggttgaaagcttactgcatttatctttgtctttttttttttgagatggagtttatctctttttgcccaggatggagtgcaatggcatgatcttggctcactgcaacctctgcctcctgggttcaagtgattctcctgccttagcctcccaaatagctggtagctggggttacaggcacacgtcaccatgcccggctaattttgtatttttagtagagatggggtttcaccatgttggctgggctaatcttgaactcctgacctcaggtgatccacctgcctcagtctcccatactgccgggattacaggcgtgagccaccgtgcctggcctatccttgtctatttttgtttaataatgaaaacatgtttgctttgtacttgtctttgaattttcacccctggatattgaattttttttctttcaatgtagcattgaaaactcatctctacaaagatttaaaaaaattagctaggtgtggtggtgtgtgcctctggtcccagctactcgggaggctgagtcgggaggattgcttgagcccaggaggctgaggctgcagcgagttgttattgtgatactccactcctgcctgggtgacagagcaagaccctttctccaaaaaaaaaaaaaaaaaaaaaaaaggaaaagaaaaaggaaaatgaaagggcagccaggtgcagtagcttatgtctgtaatcctagcactttgggaggctgaggtggtaggattgcttgagctcaggaatttgagaccagtctgggcaacatagtgagaccctgtttctacaaaaaagaaatttaaaaaaattagccaggtgtggtgttgcacacctgtagtcccagctacttgagaggcagtggtgggaggattgcttcagtctgggagatagaggctgcagtaagctgtaatcatgctgcactccagcctgggtgacagagcaaaaccctatctcaaacaaacaaacaaaacaaaaaacattcttagtgttacaacttgaatatgtacatgtgtccacagctgcgtaatcatcacccacatcaagacatagcatatttctagcatccccagaagtttcccattgtcccttctagttaatttctcctccctgaaataaccactattctgacttctatcactattgttcagctttgcctagtattgaatttcatattagtgagaacatgcagtatgttttcttgtgcctggcttttcattttatatctttgagattaaagatatatgacctttttttgcatgtgtcaatagtcttttttttttttaatagagatgggatctcgctatattgcccaggctggtctcaagtgatcctcccactttggtctccaaaaatgctgggattacaggcatgagccaccatgcctggcctgtcttttatttttatttttattttttttgagatggagtttcactcttgtcgcccaggctggggtgcaatggtgcaatcttggctcactgcaacctccacctcccaggttcaagcagttctcctgcttcagcctcctgaatagttgacattacaggcacctgccaccatgcgtggctaatttttgtattttcagcagagacagggtttcgccatgttggccaggctggtcttgaactcctgacctcaggtggtctgcctgcctcggcctcccaaagtgttgggattacaggcgtgagccactgcgcccggccatggcctgtctttgtatttgggtgtagtgttctgttttatgaatacaccataatttatttctccattctcctattggtagacatttgagttgtttccagtttttggccatcatgaacaacgctgacataaacactctcaggacatgtattttgaaggacacacacatacatttctattgcgtatgtacagatctaggagctttggttcatagggtggatgtatgcttacctttagtagacaccatcagttttctagtgttgtaccaatttgccatcccataaattttactgtgctctgatcgtttgtaattactgttgtgattttatcttcaaacccagagttatttaagtggatgttttccagtggttatattgtttgtggtattggttgtagctattgctgctgttgctggcaccagccgtagcacgttgtgcatgtggctgggttgggtagcaggcaaatcagatcagagtctgttggaaaatgtggattgcaacagggcagtgggctttttcttagaaaaacaaatcttctaggatgacaatggcgtacgtagcctatgtacctaacattccagccatgtttcataaagtcttctatttagagccaggttatttctggtaattgcaaatcttcccaaagatggggaggtttgaatctcagagatggaccacagagaccctgtttccggatgcgagactgtcttgcctaaagggaaggcagtcctgaggttgtttcaggagggaattctgggatgagacaaatgcagaagctttgagggtggccaggtacggtggctcacgcctgtaatcccagcactttgggaggccaaggtgggtgtatcacctgaggtcaggagttcgagaccagcctgaccaacatggtggaaccctgtctctactaaaaatacaaaaaattagctggacgtggtggtgtgtatttgtaatctcagctactcgggaggctgaggcaggagaatcacttgaacccaggaggcagaggttgcagtgagccgagattgcgccattggatgccagcctgggtgacaagagtgaaactccgtcagaaagagaaagagagagagagacagagagagagagagagagataggaaggaaggaaggggagagagagaaaaagaaaaaagaaagaaggaaagaaaaggaaaaagctttgagggtgtggagtggggaagctgtcgttaacatgggacatttcagccccatgggcttgccccttgctcttggtgtggaacaatgtttgcagagtggtgtcaaatcgtgcatacagttgtgtagggtaagtgggtcacagtgcggttaggtaactcctctcaccgtggcctagtcttcccgcagcatcttttcctggggaaggacctgatgggcgatggttgccctaactgacattctcctcttccacggacagaattcgttctttcatttgctcccttgttttccctgggtggacttggacattggctgggaaactcagctggctgttttctgcctgcctttggcagagggatgctgtaatgcagggtttcactcacgtcccgcagtggcggatggtcaacctgggctgacttctctctgaggggacattgccctggccatggctgcaaaaagacttgcccaaaagtgctggtttgcctcttaaaggtagttctagtcatctctgggtagaacccagcttttgatgttgccagttcagttttttaacatcttttttttttttttttgagacggagtttcgctctgtcccccagggacatgagggcagtggcacaatctcggctcactgcaagctccgcctcctgggttcacgccattctcctgcctcagcctcccgagtagctgggactataggcacccaccaccacgcctggctaattttttgtatttttttttagtagagatggggtttcactgtgttagccagatagtctcaatctcctgaccttgtgatccgcctgccttggcctcccaaagttctaggattacaggcatgagccactgcgcccagccttaacatctttttactagaggaattttctttttttttttttttgagacggagtctcgctctgttgcccagactggagtgcagtggcacaatctccgctcactgcaacctccgcctcccaggttcaggcaattctcctgcctcagtctcctgagcaggtgggattacaggttcacaccaccacgcccagctaatttttctatttttagtagagatggggtttcaccatgttggccaggctggtcttgaactcctgacctcaagtgatctgcccgccttggcctcccaaagtgctgggattataggtatgagccaccatgcccggctggaattttcaaacataattttcatgatgcagcttcaagacttatcagcatgtttcatctgttcccacccactggctgctcttaatttctttctacattgttagcaggtagggtctaatactccatttcctcttgtagctccccactcctgcagctctcccaggagcactgcagactttggctttcccagaatctcctactttcaaggaggtgaatgtagcttgaagtaggttttttccctccccaatttttgtatttttaaataatttcaggctaggtgtggtggctcacacctgtaatcccagcattttgggaggctaaggcaggaggtttgcttgagcgtgggagttcaagaccagcttgggcaacatagtgagacccatgccacccctccatccctacaaaaaataaaaaaatagcagggtctggtggcttatacctccccacactttgggaggctgaggtgggaggccctcttgagcctaggagtttgagaccagactcagtattgtagtgagacacagtctctacaaaaataaaaataaaggaaatagctgggcatggtgggcatgcaacggtagtcccagccacttgggaggctgaggtgggaggatcacttgggcacaggacttagaggctgcagtgagctttgattgtgtcactgcaatccagtctggatgacagagccagacccagtctcaaaaaaataaaagattcaaattcagagaagtgttacaagaatagaacaaagaactcctcaatgtcgtccttcacccaactgttaaaatttgctacatttgctttcactgtgttcttctgagccattttagagtaaattacaaacctcgtgtttctttcatccctaaatactgatgtgtctggttcctaaaggagaaggatactacagtacaattaacaaaactaakaaatttcccgtttttgcagtgttgttaatctaattcagatttcccagctgtcacagtccaggacctcatgcaagatgcagtgtttagttgtcctgtgtctttaaatctggatctgcatcagttccttagggtatttatgtctttcatgacattggcatcggcgttgttgaagagtacagacctttttttttttttttttttttttgagatggagtctcgttctggcacccaggctggagtgcaatgacatgatcttggctaactgcaacctctgcctcctggttcaagcaattcttccaccttagcctcctgagtagctgggattacaggcacccaccatcatgcccagctaatttttgtgtctttgtagagatggggtttcatcatgttggccaggctggtcttgacctcttgacctcaggtaacctgcccgcctcggcctcccaaagtgctaagatcacaggcatgagacaccgcgcctgcccccaacccccccyttttttttttttttttaattgaracagagtctggctctgtggcccasgctggagtgcagtggtgtgaacacggctcactgcagcctctatctcctgggctcgaggaatcctcccacttcagcctcttagttgagaccacagatatgtgccaccctgcccagctaatttttaaaaattatttggcagattcccctcaacttggggctgtctgcttttcctcatggttagattcagagtgtgcattcttggcaggaacacccaggagtgactttgtgtccttctcagtgcagcatatctgggagctcatgactcagcttgtttattattgatgacattaactttcatcacttagggtgctgtgtgtcaggtttttccactgcaaaattactgtttccccttgtcaatgaaaaggtattataatttacggggaggtactttgagactgtgtaaatgtctattcctcatcacaccttcacctgctagtttctgcatccggtgattttactctgatgcctatagatttttatttttgaattccatccttccttctgcatttattaattggcatagtactgcaaagaagggctttccgttttcatgtatgcgtgtgtgtaggtatgtattatcagcttctactcatggattcagattttattccatgggttataacttatttctggtgtaattttttttttttttttttgagatggagttttgctcttgttgcctaggctggagtgcaatggygcgatcttcgctcaccgcaacctccgcctcctgggttcaagcgattctcctgccttatcttcctgagtagctgggattacaggcatgtgccaccacacccagctaattttatatttttagtggagatggggtttctccatgttggtcaggctggtctcaaactcccaacctcaggtgttccacctgcctcggcctcccaaagtgctgggattacaggcgtgagccactgcgcccagccttttttttgttgttttttaaattgtttgtttattttagatagagtcttgctctgtcacccaggctggagtgcagtagcgcaatctcagcttcctgggttcaagcgatccccccacctcagcctccagagtagctgggactacaggtgtgtgctggctaaattttttatttttattttttgtatttttgtagagacagggtttcaccatgttgcccaaggctggtcttaaacttttgggctctagtgatcctcccacgttggcgtcccaaagtgctgtgggattacagctgtgagccactgtgcctggcctctggtgttgatttcatgctaaaatgatctctggcttggccagtggctgcctcttcaagcttgctgctgtatcttttcacatgtccccatcatatatttttgtcccaacataatccaatataggtaaaatttactatgtgataaagatggcatttaaaatcagaagagaaaggcaaacaagtggcattaagatcatcagctaacccagtggtttttgaagtgtgatcctgaggccagtggcacaagcatctccaggaaatatgtcagacacctaaattctcaggccaacaagcccttgggattcggggacacacttgtttgagaaccagtaagctaaaccacttgagggaaaataaagtcaggtaccttgcataccaaatgtggggtcgtttgtttgtttgtttgtttttgacaaggtcttgctctgtcgtctaggctgcagtgcagtggtgtgatcataggtmactgtagcctcgaactcctgggctcaagcgatcctcttgcctcagcctccagagttgctggaactacaggcatgcggtcctgtgcctggctactgaacctgtatattaaacactatgaatttgtactgaagccaccaatccaattccaactcagctccacagggctcttcctaaccttcctccactctcatgagaaccctggcactcaacactatttatatatttacaaattccttcacatctgtaatgcacagaaggcgatttgagaattcctgtacccacaccaccatgaaaggtgaagttgattttgaaaagctccgtactttatgctgtccatgttctgtgtgtgtttcttctctttcctcgtgtgtctaccagattcaaaaagagaaagaaaaagaaaacaacctcctatttatttaaaaatcttttaagcagagggttattacagcactttacattccaagaacagacaggccagtcatgagcggtgggcctcctcccttattgctccgtgaggatggagtgttctggtggatgggccgtgggtcttgagcagctgtacctgacagacagtgtacscatttattttaaagtaaacacagcactgtttttccagtttttcagctggargataaataaaactactgaaccttggaacttgagtcagtgggagaagagaagaaatttttaaaaagttgctcttcagttaaaaacaactttaaatttatttttattattagttttttaaaaatatttatttatttatttttatttttttgagatggagtctcactcctctgtcattcaggctggggtgtagtgggacgatcttggctcactgcaaccttcgcttcctgggttcaagcgattctcctgcctcagactcctgagtagctgagattacaggcatgagccaccatgcctggctaatttttgtatttttagtagagacagggtttcaccatgttggccaggctagtctcaaactcctgatctcaggtgatcaggccatcttggcctcccaaagtgctgggattacgggcgtgagccacctcacccggcctaatttttattgttagttttttagaggcaaggacctactctgtcactcaggctagggtacagtggctcgagcatagctcactgtaaccttgaactcctggccctaggccatagatcattcactgagctatgatcatggcactgtattctagcctgggtgacagagtgagaccctgtctctttaaaaaaaaaaaaaaaggagaggggcaggggctgggcacggtgcctgtaatctcagcactttgggaggctgaggtgggtggatcacaaggtcaggagtttgagaccagcgtggccaatgtggtgaaacccccgtctctactaaaaatacacaaattagcggggtgtggtggcgggtccctgtagtcccagctgcttgggaggctgaggcaggagaattgcttgaacctgagaggcggaggttgcagtgagccgagatcgccccattgcactccagcctgggcgacagaacaagactccgtctcgaaaaaaaaaaaaaaaaggcaatggaatcatacatactgtatattatggcctcaacacatgttcccaatttcctttctctgctttattttctttctgagtagctaagactacaggcgtgtgccaccataccaggctaatttttaaatttcttgtagagtcagggtcttactatgttgcccaggctggcaattttaaacttaaattggataaattactcaccattcttcagctgaggaggcagcaagggacaaaagtaaaagacagctacagaccctggtgccttcaacaggcttcatggtagaaactgctaacccagtcctgcatacccagttagttttttcaacctggtaaaccactatttcaatcttgtggaatgattacaataatactagattctgagagtttttctcttgctccctaaattgaacattattattaatattttgtatgactgtaaaagctgtgtaaaatttcatatcatgtatattttaccacaattaaaaataattacttagcccagtgcagtggctcacgcttgtaatttcagcactttggagactgaggtgagaggatgacttgaagccaggagtgcaagaccagcgtgggcaacataacgagacccaccgctctattaaaaaaaaatctatatctataactatatctatataatatatataaatatatatactttatatatgtaatatataaacatatatacactaaatcattcttgagcaagctaataaaataaaaagtaaaaaaagcaatacaggctcataaaattaaaaacattattagtatttttctgattattattatttcatgcctattactaaaaaggacaatattctgagtgcttcgtatgtatcagtcatttttctgaattccctcatatgtatatacatatacacacgtatacatgtacacatgtacatacacacatgcacacgtatacatatacacacgtatacatatacacatacacacatacacatatacacacacacatatatacacacatgcacacacatatatgtgtaaactcatttattcttcctccgtacattcaaggtagattgtggtgccatcccctttgatgaagaaattgaggtggagagatgctatgtaacttgtccaaagttgtcctataaggagttctcagagttaggatttaacccagttcttttgttcctagagtctctgcccataacctctatacattctgccttccaaggaagaaggttaaaatcatttggaattctgttattcagacctaatccagttaatactttgtaatatagccactgttttggggggcatataatcatatttgtatgtatgcctttttccccccaaatgggaactcattatacatatttctttgtaacttgattttttcacccagttttttccgcatcagtgaaactaggtcagttttaatggctacagtaatgggtgtgctttgttttgttttgttttttgagacagtctcatgctgtcacccaagctggagtgcagtggtgcgatgttggctcactgcagcttcaacctcccaggctcaagcgattctcccatcttagcctcccgaatagttgggattacagatgtgcaccaccatgctcagctaatttttgtatttttagtagagacagggtttttgctatgttgaccaggctggtctcgaactcctgacatcaagtgatccacccaccttggcctcccaaagtgctgggattacaggtgtgagctactgtgcccagccagatgctttgtttttgttttgtataaatgtacccacagtttaaccagtctttcattcttggccctttctattgttttttacaattactagcagcactttttgttaaactcttttttttttttttttttttttttttaaagagatggagtctcgctccgtcacacaggggtgtgatcacagctcattgcagccttgacctcccaggctcaagtgatcctcccacctcagccttccgagtagctgagattacaggcttgtgtcaccatgcttggctaattttggcatttcctccctcctcagcctcccaaagtgttgggattacaggtgtgagccattgtgcccagcctaaattcttgtaaagatacctttatgctcctctttttttttccctacagtaaattcccaggcatgcagtcgctgggtcagaaggtgggcgtgtttcaagtttttgatgcctgctgcctgtgtccatggcagagtctggaccaatttacacactgtaagggtgccacatacctgtttccctgtatctccaacagcactgggtgttgtcagtctttttaacttaccttagtctgttaggcaaagtgatttctctttgttattttattttattttgttttatattttagattttattttatttatttatttaatttatttattttatttttatgagatggagtcttgctctgttgcccagactggagtgcagtggtgtgatcttggctcactgcaacctctgcctcccgggttcaagcaattctcctgcctcagcctcccaagtagctgggattacaggcacctgccaccacgcccagctaattttttatttttagtagagatggggtttcaccatgttgactaggctggtctcaaacacctgacttcaagtgatctgcctgcctcagcctcccaaagttctgggattacaggtgtgagccacggcgcctgacctccttttcttcttgaggaacctccagtgaggtgttctgctgctctgctgcatttgcttgtcccaaggtcgccagtgacctccgtgttgctaaacccaatggtcacttctcaagctgtaatcactggccttatagattggacacaatgaatcgatccttcctgcttgacatatgttctgccttggtttcagggtgccacaatctgtgggttttctgtccatctctctggtcactctcattcagtctcccttgctcgtttttctcttccccagtctgcaaacatgggggtgctccatggtggctttgtcctgtgttcatttgttaatttacccccctttcattcacaagcacatccagcctccttgctttaaatttggcctatatgcccaaaactcacagctagggcttctcccctggcaaccaaagacagtatttacgtctaattaacatcctcaagtgaactgttgaaatctgagtcacctgcttcccacagctttctacatcttgaagcagtgacaattctgtgtcactcaggctaaaatcctccgtgccttccttgacttcattttctgtcccatcagcacctcctgtctgcattgcctttaggatatattctgggatccgaccatctgtcactgtgactgctgctgtcacccatgtccaagtcacttcttgactgttattgcaaaggcctcttaatgggtctccctgcatctgctgttgtcttcctatggaacggttctgaatgcagcagccagaataattcaaaccagaagtcaaattgtattgctactccataaaaaccaaagtcattccctatgagcccaccggccccctgtgatgcctttatgtgtgtctgctactcctttgttacctcatctcaaacatgctcctccgctttccagatccctcgggccacaggtctccctgctgtttctccagcccggtgctgctctcctgccactgacccttggcactggccttaaatctctcctgaaactgaccccttccagtccactgaaatatcacctcagtgaggccttctttgataatactgtcttcattttaatttaatttaattttctagagatgggatctcactatgttgactaggctggtcttgaactcctggccccaagcaatcttcctgccttggcctcccaaatgctgggattacaggtgtgagccactgtacctggtcatgccttttaaaaaaggcatgtaattcagggattttaaaatgatttttaaaaatcattaattcagtgatttaaaaaaacattactgagtcatgcagtcattgccatgaatttttcaatcgccccagtgagatcctttgtgcccatttatagtgaattcccctttccacctccagcccctggcaaccacgaatctactttgtgtctctgtagatttacctttcctggacattttatagaaatggaatcatacagctgggcacagtggctcatgcctgtgatctcagtgcattaagaggctgaggcgggggcaggggatggatggggttcgagactagcctgggcaacatagtgagaccctctacaaaaaataggaaaattagccaggtgtggttgtccacacctgtagtcccagctactcaggagggtgaggcaggaggattacctgagctttggtggtcgaggatgcagtgaactgtgatcatgccactgtactccagcctgggtgacagagtgggacccctgtctctttattttttgttattattatttttttgagatggagtctcactctgttgcccaggctggagtgcagtggtgcatctcagctcactgcaacctccgcctcctgggttcaagtgattctcctgcctccgcctcctgagtagctgggattaaaggcatgtgccactgtgcttggctaatttttttgtatttttagtagagatgggatttcaccatgttggccaggctggtcttgaaatcctgatcttaagtgatccacccacctcagcctcccaaagtgttgggattacaggcgtgagccaccgctcttggccccctgtctcttaaaaaaaaaaaaaaataggaccacacgtattgtatattgtggccttgaaaaaactgtcttaattgtgactactcctccccagcattccctgtttctcttctctgctttattttcttgtaagcggttctccccatatactactgtttattttgtttatttttctcattcattgtcctccacaaatagaatgtaaggtctatgggggcaggcgttttgtgaattttgttcacttttgtgtacctacaacacaaaaccatgaatacatgcatatacacacacacacacacacacacacacacacacgacgttgaaagagtgactttctcctctaattactgaggatgaacgtcttttcctgtgacttaggtctttgcagccagtgtccggctcacctcggaggctgacagcaggrccagtgtggtgcgtgctgcccactccggcgaggctatgggctgagcccagttccagccgccaaatgcaagccgttgtttcattttgccctgatcgagttgcagttacatcagcgactactgtttttttgattggcaccagatgccaggctttgggatttcaggctgtctttagcggtctctgaaaagccctctgtgtgtcgctttctatcatcctgcacctcaggcagatatgcccaggccagaacctcaaggaattcccaaagatgccaaaagcaaccccctccctcagccccacaccctcaacttctcaaagttgcagccggggcccttttcctggctttggtatcagctgagagctgttggaaagaaaaggtccttttagccacaagtytcaaaaagtaaacacggaggccctgcaacgaatgttccaacaatcctgcmccctgtgtcactgagtgctggctgagaggctgccttgtggagcctcacctgaagagagaagaaaagctctctgtcaggattcccttcccctggtccaggctgctgcctccagagtgttctgtgaggtgtcggctttggaagtcggtcagcctcgtgggaacacatatttgagcaaagggtgattctgctccaaatgctgaatgctggccaaggcctttcctcttactccttttctacaggtatattgtgactgtttgcattttagtctgcagtaggtggccaagacattttttctcccctttcttttctttcttacttttttttttttttttttgtagagatgtagtctcactgtgtcaggctggtctcaaactcctggcctcaagcaatcctcccatctcggcctcccaaagagctgggattataggcgtgagccaccatgcccggctatttttctttgttttgttttttttttaaataagaaacagggtcttactctgtcaccctggctagcgtgcagtgccatcatagctcagtgtagcctcaaacttctggctttaaacgatcctcccaccccagcctcccgagtagctaagaccagaaatgcacaccactatgcccagcttttttgtattttttgtagagacagggtctccctttgttgcctgagctggtctcaaactcgtgggctcaagcgatccttccacctcagcctcccataatgctggagttacaggtatgagccatcatgcctgacccctgcttttctttccttcttagacttaagagtttcttcgtgttgggtcagggttttgtgtgagagtttctttcttctctgtagggcattttcttaggatcatgagccttgcttgtagcaggggcagggcctgacgctgatttatcagctttcgtgcagtaagcacctttgaattccgagctagaggctggcgctgaagtggtgaacagcagacagcatccctgtcctcctggaatttagactctagagaggaaaacagaaagtcgaacaaatggtgcaaactattccagttgtgacagatgcgatggagcaaagtacaggatgatctgggaatgcatcatgggagactttgcctggcctgggtggggtgtgtgtgtgtgtgtgtttgtgtgtgtgtgttcatgcatgtgtgtttatcaaggaaggcttcctggaggaagtgacacctggacaccagaaagagaaaaaggaatcgtctagaggaacaagagaaaatcattttaggtggagggaacagcatgtgggaagctttgaggcaggaacaagctggttgctgtcaagtcacacaggaggccaacggcagggaggaggcaggtgctagatcagtgctgtccaatagaaacagaatttgaggtgtgtgtataatttagaatttgctactagccatattaaaaataagtcaaaacataggccaggcaccgtggctcacgcctgcaatcccagcactttgggaggctgaggccagtggatcatttgaggccaggaattcaagaccagcctggccaacatgacaaagctccatctttactaaaagtacaaaaattagccaggcatggtggcacgtaatctcagctacttgggaggctaaggcaggagaatcacttgaacccaggaggcagagattgcagtgagccaagatcgcgccactgcactccagcctgcgcaacagagcgagactgtgtctcaaaaaagaagaaaataaaaacaaaaacacaggtgaaattaattttaataatgtagcttatttccacatatctgaaatgctattttaacatgtaatcagtataaagaaaagtactaatgagatattttacatactttttggcctcaggtgtgtctttctgacacacagcacatcttaatccataccagccaccttctaagtatggctgcaggtagctgtggcccccatattggacagtgcaggtctagaggttgagtccctggagaaagactgggaaacttctcttcttttatttatttatttgtatttacaaattttttgatttaaattttctctttttcttgtgttttttttttttgaggtggagccttgctttcttgcccaggctggagtgcagtggtgcggtcttgttcactgcagcctgtgctcctgggttcaagcgattctcctgcctcagcctcccaagtagctgggattacaggtgtgtaccaccacacctagctaatttttatatttttagtagaaaaggggttttgccatgttggccctgctggcctcgaactcctgacctcaagtgatctgcctgccccagcctcccaaagtgctgggattacaggcttgagccaccgtgcccagccaaaaatttttgttaaaacatcaccttgtcttcaraagaaacttttctgcgaaatcaggttaccattagtgtagggttatatttgtacagttctagaaacttcttccattcctcttgagcctgtggcacaggggcgttgggccatcttctccaagggcctgtgctgtttctcatcagccgtgtagcattcaggccctaaatgaacacctgctgcaggccgggaatggtggccttgacctggtgacaggaaaatgagattgttgcctgaatgtgagctgtttccttccccttgccaaaaacaaaactgaaacacttcatctggtgtttgggcctctgctccgcaccagtcattcgggcggcttccgcctgaccgtccattccagcctcccaggttctcccaggggaggtgctgtggctgccggaatagccatgttaacatcagacctcatttatctcattgcagtgtttaattttccctcttccttcagactaccaggattcttggagtatttttcttagtgtaggaggcttattctttgtgggagagtggtccgtcaaaagggaaggtaatcctggaccagagtaagagtgtcacagtcacataagtgggcagttagtgccactattaggtacagagtgggactctgacttcagtgcctggcctggcctgggagtgctgtttattacatccaggacagtaaggcacacacttctcagaaaataatatccctccctccctccggtcccccctccccctccctcccccttccctttgttccttccttttttccttcctcttgcccttttcctctctccctcaattaattaatgtttataacacatgtattgcatgaattcattctcttggagggaggaatccccaaaccctcttgagtggatagagtgcatctgtatatatttgaaaagattcatagattacaagtgaaaaatcaaagggcagagctttgggcctagaatgacctcaactttgcacctgtggctttttttttttttttttttttgagacagagttttactctgtcacccagactgcagtacagtggtgcgatcttggctcactgcagcctccacctcccgggttcaagtgattctcctgcctcagcctcccaaggagctgggattacaggcatgcacaaccatgcctgactaatttttgtatttttggtagagatggggtttcactttgttggccaggctggtctcgaactcctgagctcaggtgatccacccacctcaggctctgggattacaggcatgagccactgtgctcggccttgcatctgtagcttttatgtgtatatttgtgcttgtgtttgcaatgacttcatacaaagtttttcaaagtgggcgatactggctgggtgcagtggctcacacctgtaatcccagcactttgggaggctgaggtgggcggatcacttgaggctaggagttcgagaccagcctgaccaacatggtgaaaccccgtctctactaaaaatacaaaattagctgggcatggtggcaggcacctgtagtcccagctactcaggaggctgaggcaggagaatcccttgaacccaggaggcagaggttgcagtgagttgagatggtgccactgcactccagcctgggcaacagagcgagattccatctccaaaaaaaaaaaaaccccaaaaaccaaaaaactaaagtggcgataccatgggaaaggctttggaatgtgtgcatttgtggagtaggtgtcatagtttacctttctgtatttgaatttttttgatgagcacattattttttattttgaaagctaatattatttattgtaaagacgatatgatatagcagaagtgggttttttttttttggtttttttttttggatacagggttttgttctgttgcccaggctgaggtgtagtggtgcgatcacagctcactgcagccttgacctcctgggctcaagtgatcctcccacctcagcctcccaagtagatgggaccacaggtgcatgccactacacctgtctaagtttttacattttttgtagacacaggatctccctatgttgcccaggctggtctcaaactgggctcaagggattttctcaccttggcctctccaagtgttgggattacagacgtgagccaccacaccctgcctggaaaatactttttaaactttttactatggaaaatttcaaacataaataaaagtagaagcagccaggcgcggtggctcatgcctgtaatcccagcactttgggaggctgaggtgggcagatcacctgaggtcaggagtttgagaccagcctggccaacatcatgaaaccccatctgcactaaaaatacaaaaattagccgggtgtggtggtgggtgcctataatcctagctactcaggaggctgagtcaggagaatcgcttggactgaggaggcagagcttgcagtgaactgagatcacaccactgcactccagcctgggtgacaagagtgaaactccgtctcaaaaaaaaaaaaaagtagaccaggcgcagtggcttatgcctgtaatcccagcactttgggaggccgaggcaggcagatcacaaggccaggagtacgagaccagcttggccaacatagtgaaactctgtctctactaaaaatacacacaaaaaaattagccgggcgtgatggtgggtgcttgtagtcccagctacttgggaggctgagacaggagaattggctgaacccaggaggcagaggttgcagtaagccgaaatagtgccattgcactccaggctgggcaacagagtgagactccatctcaaaaaaaaaaaaaaaaaaaaaagtggagccgggcacggtggctaaggcctgtaatcccagcactttgggaggccgaggcgggtggatcacgaggtcaggagatcgagaccatcctggctaacatggtgaaaccctctctctaataaaaatacaaaaaaaaaaaaaaaattagcctaacacggtgaaaccccgtctctaataaaaatacaaaaaaaaattagccggacatggtggcaggtgcctgtagtcccagctcctcaggaggctgaggcaggagaatggtgtgaacccgggaggcggagcttgcagtaagccgagatcgtgccactgcactccagcctgggtgacagagcgagactccacctcaaaaaaaaaaaaaaaaaaaggcgggggggagagaataatggaccatctagcaccagttacccagcttaaatgataaccagcacacatctacctgtccttcatctttagctcccatcttttggggaagtatttgcaagaaaatctcatgccttgtgtcatttcacttgttgacactcctgcatacatgtctaatgtttaactgaaatggaaattatgaaaaaaaaaaaaactactgtggaattaatggaaattgaacaaagaaaatctttgtttcataatcttactgctcaaacacaacttatcatttttccctggttcatttatttctttgcccctttgtatacttatttttacatgattttagtaatagggtgcattctataatgtcagaggttgcagtgagccaagatcgcgccactgcactccagcctgggcgacagagactccatctcaaaaaaaataaaaacttaactttgtggtatgaataattttccatgttgttgtatacgctttataatcactaatccaaatcttaattggggcataataggtccctcatctgaaattataatttgtaaaaaaactccaatgtatacaagggaatttttttaaaagcagaattgtaaccttaaaaaataattttctaagaggactcctacattttgctctgcaaagaacatttaaaaggaggtttgttctttggaaggtgtttataaacatggctttgataccwggcaactgagagaggcggttgtggccgctgcggttccctgagggcacagagcatgggtgatctgttggagccaggcagggcctgggcaggggattaatggtgtggcagggactctccctcccctcggagatgaggagcactaatgacaaggcagcagtaatgatgtgaactgataatttattctaaagacttaaccttcccagatctgtatttatttccccaggtaccttttaaaaaattaaaatatgctacggcttgagagatttaccaagacggatgaaatctttgtatcttgttttaagaggatccacagctggttcccgagactccttctggggtaccttgttacgtgggtgactgtaatgggtaactggtgctgaattgtgtgtgcatatgtacttttttttttaagtaaaggaaaatgtgtgtagctggatgggccttgcctatagagcactgggaccctgaatcaagagaaataagggtggtcctggttggtgagtccgttatgtactgaaatgaggacatgagtgccyaatccaccttcctttctttccctcctcctaagggcagatgccccatccatgcttagaggctcccctttcctgccttcccaggaacccttcttgatcttcctcccatctctctagctgttcttctctgtctttcttgcaaggtcatcatctattattaattttttattaattttctttgagacatagtttcgctcttgttgcccaggctggagtacaacagcgcgatctcagctcaccacaacctctgcctccctagttcaagcgagtctcctgcctcagcctcctgagtagctgggatcacaggcatgcaccaccacaccccgctaattttgtatttttcgtagagacgggtttctccatgttggtcaggctggtcttgaactcctgacctcaggtgatccgcctgccttggcctgtcaaagtgctgggattacagatgtgagccatcgtgcctggcctaatttttatatttttagtagaaatagggttttgccatgttagcaaggctggtcttgaactcctcacctcaggtgatccacccgtcttggcaaggtcatcatctatttaactgttaaatatgggagtttcctattattccatcctcttcttccatgatctcatctctgtttcaccttcctctctatgcaaaccaccgtgtgcaggtgagccacagatttgaatcacttctgagctctcttcccacgtatctgacgactctcttggtgtttccctgtggtgttccctgacaggtgtttccctgtcagaagcacctcaacatgtgcaagtcacctcctcagacttggtcctgttcccgtattctgtatttcatcatatagagcctctatttgtccagttaagtgctttagaatcccaggagccgtcttcgatacccgacccctcttgcccaccccgttttctaatctcttttcagattatcttgatttttacttttgcaagtctgcccacttcttcagctccacttctgctctagtcctttcctggctgccaaaattttcatctgcagcctcctgtctgctctgcctgtttctgtccttcctttcctccggcttgttttccacaccaaagccagaatgattattaatccagcaaggctgatcttgtcacacctcagttaaaaaaccctttagcactgtgcagtggctcttaggttacagaaaaactctctaacacagcatgtcacaaggcattgcaatgtccagtgaccactcagtcctcccacccatttggatctcattccagtccagccccgttcatctctgcccactttcctgaatgcacccagctcattgtgccacaggacctttgcacacaacatttcccctgcctggatggtcttcctccctgccctgccctaccctgctagctgtcttcttgaaacttagatgacagttatcagtttctcaagaaacttttcctgatgtcctgaccaggccaagcatctggctgctcaggggaccatatgttaatatctcttgcatgaaaccttttcttacagttgcaactttacatttccttgttacttccacttctcccactgaattaattgtaaggttcctaaaagcagggacaacgtctgtttccattttccatgataacatagcttcaagcactgtctggaagatagtgggcacccagcaaatgttacttgaacctcctgggttcaagtaatcctcttgtctcagcctcctgagtagctgggaccataggcacacgccactgygcccagctaattttttttttttttttcagatagagtctaactctttcacctaagctggaatgcagtggcgcgatgttgggtcattgcagcgttcgcctcctggattcaagtgattctcctgcctcagccacccaagtagctgggattacaggcacatgccaccatgcctggctagtttttgtatttttagtagagatggggtttcaccacwttgcctaggtgggtcttgaactccagcgctcaggcgatctttctgccttggcctcccaaagagctgggattacaggcgacaaccaccatgcccggcctagtttttttctgttttatagagatgagggtctcactttgttgcccaggctggtcccaaactggtctcaagccatcctcctgcctcggcctcccaaagtgttgggattacagggatgagccactgtgcccagcccaggaaatgtttcctgaatraatgaacaagaaacagagaaaaagtttgtaaactggctttgtaaaaatgaggctattttctctagaagagttcatacaaccctcaggagaccaaaactttaatttagcaatgataaagggtagattcccagcggtagtagcccaaagaagagactgcaagaccaagccagagttctcattacattctgggttctgggtaagaccctgccagagtgtgagtgttggggggccgcggggaggtggagtragcagagtcagcattggtgccccaacaggaataccagtgttcactgttggcctagctgggtagaagagactttctgttgttaggctctggctaaggttggaagccgaagagccatcgtaacagtaaatcctggaatcatctggcttcctttactgcaaaggaaatgtgaaagagccttctctctagacctggggtggactccagcctgtgtgtgtctgagtttcagggaactggggaatggaaaggagactgtttactctctgcccttctggaatttcccccggttcccttcctctgtgtaccagtgtttgcagttatgtgtagaatgaacacgggcctgttaatgaagtgctgcttactctcacccgcttttgatgggcctatgggattgagggcagagggaggcaggaagaaggaggcttgtttcactaagcaggtcttatgttaatggccaaatcagtcacatcttcatcgggcttcagagactcttaatcctggcgtccttggcctccctttaaaaaattctcctttctttcttgtttcatgtttctcaaatttccaggtaaatcctatcatttgtattctgaattaggaaccaaaagaaaacagaactatttttcctttgacatgcacatacatttcggtggtatggggtggggagggacaataatgagaaaataccccaaactagaaagttctttcgtacatttgctgtgaaactctccaggcaagagttctggattttgtaacggaattgcattatagtagcatggtctggcagttacagtttatgtagttttttttcttttgttggaataaggacggcaatttccatgccctatttatctatatttattagtaccacatgcaaacaacatatttttaaaaatccaggtcaagaaagggaaaaagtaactcttagaaaaatatgactcatccttgctgcacgtacaaactcttctcaataggaaattattaacttgaagccacttgcaaatctgaggctttgaagggaggaaaaataagagtgagagttattccccaaacagcttgactgatgtgtcttctacctttttatattttaaactatattttgtcaaattcttgcaagtttttattgttatagttgctgttagtaccttaggcatgctggcatggaaaaaaacaaaacctttttttttttttttttttttgagacagtgtcactctgtcacccaggctggagtgcagtaccctgatctcagctcactgcagccttgacctcctgggcacaagcgattattccgcctcagccccccaagtagttgggagtataggcaggtaccaccacgcccagctaatttttgtgtttttaatagaggcagggtttcaccatgttgcccaggcgggtctcgaactcctgagctcaagcgaaccatctgcctcggcctcccaaagtgctaggattacaggtgtgagccactgcgccctgccttctttgtttgtttgtttgttttgttttgttttgttttgtttgatagtggccagttactagaacaaaaactgttataggaaatgtgaaacatacacagaggtggaaaaacagtcgatgaatccccacatgccattacccagttcagtagccatctatgacgggccattcctgtctcatctaacttcccatcccacccctgctggattaattttatgaaaatcccagacatacttcaactataaatattaatattttagtgtatttctctaaaagataagaactcttaaaaacccaacccatgatgccaatttcatacctagaaaactcaatggtaatcatttaatattttgaactatctagtcagtttttacatgtccccagttgtagtgtaaccctttcattttatttttaaaaaatttttaatgttttttgagacagagtctcactccatcactcagtccggagtgcagtgayatggatctcagctcacagcaacctctgcctcctgggttcaagtgattcttgtgcctcagcctcccaagttagctgggattacagatgtgtgccaccacacctggctaatttttgtatttttagtagagatggggttttgccatgttggccaggctggcttgaactcctgaactcaagtgatctgcctgccttggcctcccaaagtgctgggattacaggtgtgaaccactgtgcctggcccaacctttttattttttatttttatttttcgagatgggatcttgctctcttgcctaggctggagtgcagtgatgcaaacatggctcagtgcagccttgaccttctgggctcaagtgattctcctgcctagcctcccatgaaggtgggaccgcaggtgcacgccaccacgtccaactaattattttattttattttttatacagatggggtctcactttgttgcccaggctggtctcaaactcttggactcaagcgagccccctgccttggcctcccaaagtgctgggattacaggcgtgagccactgtgctcagcctttttaagccatcggtttgtctgagtcaggaaccaaacaagattgatatatcttttcagtctctcttaacttagaggtagtcctccctctttttactccttgcagtgtgttgttgaagaaactggacagcgtgtcctttacagtttcccacactttggattttgctgtgtgtctccctaaagtgtgggtctgtgtgtctctctgtccctcatgggcagatctagaggctgagactgaccttggttcttttttttctctggtgtggtgatatgtgtttccatcaggaggcacatggtgtctgattgtctctcttggtatgctggcttttaaagggctgtctttcaaagggcacagtccctggggacttcccagagtcttttccctagattctcatattcagccttactgctgtctgtcgacctccataaagtagcattagaaggtattggtaaccagttattacttagaacagaagggtgcagtcgtatagctgaagaagtatgtttgctgattactgaagttagcatgagcttaggcctttggctttcttgctgaaacctgagcctcttgccagctgaatattttcattatatatgttccatttagtcctaattgaatcagacttcctctagccatgctctaaattggcactgtttgcagcccctgcctgtgacttgcccaaagctttgattccaagagatcagtggccctgcggggcctggctgatgtgctcggtggggagtcctggggctttctaactcatgctagggaggrggccagggtagaatcttcttagacactgtgtttcttaaagacactgccatcacctttgcccaaaccaccatctgctcttgcctggattaccacagtgacctcctacctggtcttgtgtacctcagcccttctcctgtagccagactggttgtgctacagcaggaatcaggtcacttccttgctcaaaaccctgtaacggagtcccgtcccatgttgagcaattkccaaggaccttgtcccaaggcctgactgggaggctctggctacctcctgccctcatctgctcctctcttccctygctccactccagctgccctggcctccctgccattccccagacatgctaggcatgctctctcacctagcacctctgggcttgctttttcctctgcctagaatgttcttcctccagatacccacgtgacttcccccatcctttagtctttgctcaattgtcaccttcccagggaggtttttcttctctaccccacatcctctcccagcttarcattcttcatcccccttcttttattttttcctattgcacttgccaccttcttttttaaatttttttatttcattaaaaaatttttttttagtttttttttttttgagacggagtttcgctcttgttgcccaggctgtgtgcaatggtgcaatctcggctcactgcaacttctgttttccgggttcaagcgattctcctgcctcagcctcccgagttgttgggattacaggtgcccgctaccacacccagctcatgttttgtatttttagtagagacagggtttcaccatgttggccaggctggtctcaaactcctgacctcaaatgatccgcctgccttggcctctgaaagtgctgggattacagacgtgagccatggcgcccagcctgcacttgccaccttctaacagattatgcaattttcttttttttttaaggaaaaaaagaaaagaaattgcttattgtctgtttctgccaagtagaatgtaaatgctctaggagcacagatttttgcccatcttgttcctgttgagtcactagaatagtaggtgctcaaggcacggatgtgaacagcacggatgcagatagagcagggcttgatgagcttgaggggagcttgtgagcttcctatatgctaactcagattccagttatggaaatrgactcactaaacctactttttcatgggtttcttgattttgagcaatgcctccaaaggcagcaggaagacatactggaagagaaagggcctctgtagagccgtctgcacagctgtagtgaaaacagagggccccagaggtgaggtggctaagactgctatttataactaaggttctagtatatgttttccagccacacttacgcctttcagcctcccctgtatgctcgaatctgtcactcaattagctaatggtttctttagtcccattatgtattatagggttcctctggctcaatttttttaaaaagcaaataatgaggtgttctgttctctgaagtttaattttttaaataaccttgccaatttaaaaaaacctttccccaatgtttaattatgaaatttgcaaacatatggaagaattgaaagagtgatacagtgaacacccaaatgccatccacctatttctggctcttgttaacatttttttgccaaatttgttttatctatatgttattatagtatatggctgggtgtattttttttcctgagccrtttgaaggtaaattgcagatatcatgacactttaatccccaaaacttcaccctattcttctaaaaagtcacttgaaaataactgcatatatcattctcatctactcttgcgtctcccaagaataagacatgctcatataaaaccaaagtaaattttttttttttttttgmgacagagtcttgctctgttgcccaggctggaatgtggkggcacgatcctggctccctgcaatctccgcctgccgtgtttaagtgattctcctgccttagcctcccaagtagttgggattacaggtgtgtgccaccatgcctggataatttttgtatttttagtaaagatggggtttcaccatgttggccaggctgatctcgaactcctgggctcaggtgatccacccacctcggcctcccaaagtgctgggattacagacgtgagccaccgtgcctgtgcataaaaccatagtactactattgaacctaaaaacattaacaataatttcaaacatcatcwaatattcagtttgtatgcaaatttctccatttatcccaagagtatttttttcaaaccaaggtttagtcacaattcacgcatggcatttgttggttttctttagatctagaagagtctccatcctgcctcctttttttttttgtttaaatgaatttaatgacattaacattttcaggagttcaggacagttattgtatggatgtctcacattctggcatctgattgcttcctcatggtatcatttaatgtttctctatccccctctttcatgtgaagcatgtggcatcaggttgccttgctttgctctcagtgacagtaaattagatcacttggttatcatggkgacagccagaggtctcaaatagaacagaggagggttatgttctcaaaagtttagtttaaagaaaaaaggccctctctctcctcattggctatttaaatttaaattaaattaatttattttttgagacagggtctcgctctgtcacacaggctggagtgcagtggcgcaatcttggctcactgcaatgtatgcccccaacccaggctcaagtaatcctcccacttcagcctcccaggtagtggggaccacaggtgcaccctgccagacctgggtgattttttgtatttttaatagagacagggtctcaccatgttgcccaggatggtctcgaattcctgagctcaagcgacccacccatcgcagcccatctcagcctcccaaagtgctgggattacaggcatgagccaccatgcccagtcctattttacttttttgagacgcagtctcattttggttgcttaggttggagtgccctggcatgatcttggctcactgcagcctcgacctcccgggctcaggtgattctcccacctctgcctcctcagtatctgggactacagttgcctactaccatatccagctaatttttggcatttttattagagatggggttttaccatgttgcccaggctggtcttgaactcctggactcaagcaatccatcctccttggtctcccaaagtgctgggattacaggcatgagccactgagcctggctggctgcttttaattaattttttttagtgacagagtctcactgtgttactcatgcttgtcttgaactcctggcctcaggtgatcctcctacctcagcctcccaaagtgctgggattacaggcatgagccactgcacccagcccattggctctttttgaagacaaaatgtgtctcaaggtgttgtatgatggcttctgagccttcaaatatataatgattccactggagacaatgagtagataaaccagatagaagagctaacttggatccctgagatgagaccatggagaggaaaattcaggctatctctctgccttctgtccaaggcccatggcagtgtgactgtcacgggggtagaaattagcaacaagaggccttgggttcctccactctcctgttgaacattatcagtcctccaggaaggaggaaaaaaaagtgccaacactccatttatgaaacgatgacctttgaggtatcaggacaggaatcaaggagccttccggaatgctcatccctcagcacgcttccaatagcggtgtgtgtcctggagccagaaggctgggcgcctttaggagatgacctggaaacaagatgaaaggacagtttgtctgcgtgatgggtctgtggcttaccttggaagattctgtggtcacagcccaaaaaagtctcagaaggatcagaaggatcaagagaagaatgactataaaatgaatgaaggctagggcgcggtggctcactcctgtaatcccagcactttgggaggccaaggtgggaggattgcttgaggccaggagttcgagaccagcctgggcaacatagtgaaccatgtctctataaaaaaaaaattaaaaagcaaaacaaaaaacaaatacagtgaatgagaagttagaccaagaggaattaggactcttcctaaacacaggaagtcaacagggagatgataaaaatgacagcttattaggaactcggtaggtgccatttacttctttgcaagagtcctctgaaaaaggtgccatgattacccctgttttgcaggtagggagactgatgctcaggttaggtagtttgcttcacggtgcacagctctcagggactagaactgtgaattaaactcggagtgcctgaccacaccccctcttaatccacgtgcttaaaaaccctattgccagagacttaggtactggatcttggcrtaatagaggagggagaccctccttgacttaaaaaaaaaaaaaaaagcccacaataatcaacacttacgattgcatagtttcarggggctagatttggcagcagcttagctgggcagcctggccagggatctctcccgaggctgcattcaggatgtggactaagctgtagggttaggctctgctggggctggagcagctgcttcccaagtggccactcccagggatggcaagaggtggctgggggttgaaaggcctcagttccttcccatactccttggcttttgaaggaactcgtttcctttggaaactacaagtgttattttatagaaacgtttagtactcaccaaggccctcagtggaactggctgaaaatagcagcagactcactcagaaaagaattggagagatccatggcagggaagagagattaagggaaggtagagcgcttaggagagcttgaaaacccaaagggtaactggtttctatcttattataatagatctttgacttgatccagaattttctgctaagttcttaaagggttgtatctgtagagggatttagagcagtcttttttgggggggtgggggaaggggggttatctctagaaagtgctgaaatttaccttagtgtgcttatggagacatttatatatactataccttgttctagaagacaggtaagatagcttataatcatgcagtagcaactaagaaataaaacaaagtgttggattgggtggggcgggtggggagggaggttcagatatgtggttttgtaaggtgtggmgtggacggaccccgtggaaatcctcataaaggctgattccctcttggtaattattaaacrgccctgaactgaaggccatagctcctggctggactgaactgaagggaactgaaatattcagtgtggactaaacacttaactagacagaagctattcagcacagccaagttcagtagcagggtggagggtgtgtatgcagcagtttctagcctgcctagggcttggtgcttctgcctccagtcagcttgttctgtttttctgctacagtcacccacaggactgaatctgcctggtatccttggggacggggtgctctgggccacttctcaattctctctccttaagtcactgatggggctgattagcctgtattgaagtttcattgttttaacttttttttccttatttcaagacaatacattttcaggattgaaaattttaaaaaacaacatcatgttttaacacaaataagaaaagaataagcccctgcaatccctcatctagatggagatgcctcctgttgacagttccttagggtctcctcggtttctatgggcagggggatattacttgcaactaatttcttcgtctgtacgccatcaatatccctatgcttttctcacagtcctgcaagtataaacaaactaatacatcagtaatgtggaaattatggtgctgacccagtgatatgaaatgtttagaaagagtgcagcttcccctccagcctgatacaacagtgatttcattagacatattccttcccactcttttttccatgccacgaggcaaaatgtgaagatgtggagaaagcattcccagagaagccagcaaaggtgaaatgaaagcttctaatttagagaatcttaacttggggtgcattckctttagcccatccatgttgccttttgtaccccacagtggagaacatgcagctgaccctgaacctgcagacggagaacaaaggcagcgttgtctcaggcggagagctgacaattttcctggacgggccaactgttgatctgggaaatgtgcctaatggcagtgccctgacagatggtgagtgccgccctgctcctcaggactgtgcygggacagggtggggctgggcgggggccaggaggtgctgagagcttggttcttactaggccatcttggtttgattcccactcagcctggcccatagctagcccggactcttcttagctccgtggatcagtatcacaacatgaattttcaagggtcacagtaaatgtccagtctttgtaaatatgtaattgtttggtttgatagcagagaaaaacatctttcatcccatgtggactttggaaaatgaaatatctttatcaaatgtgactttggcccattattttccttcccaatacagttacactttttggggaggttgaaggtgtttttatgagaggcattggttgggaagggtacgctgtgttcttctagagatacacactagcaaaatacagacagagcagggaatttggagagtgtcccttgctctgtcccgaatgttggtagtttgtttcttttgatctagtctgaaattagtcacctttggatctagcaggaaattatttcatgaagtccgaggtctgaaatgggttgggtttctccataatttttctcattaaatgttttgttagatgtgatgtaaccatggcactttccagacaccaagcaggatttctgtagcttcaaaggggtgcaatttgaattgcaattcaagggcagttggttggaatctcagtggccggatgggccttgactgtggagaaaaatcccttaactggactgatcggtgtttggggtgctttggtgcttggagaaaaacatgtgtcattcactcattcaacacatatrtatgtaattgtattctggtatgcactaggtcttagaccaggccctagccagatggcagtgggccaaattcacatggtctccactgcttcaggtttacagtctccttgatgagggcaggggaagttagatatcaaatgagtaaacacacagataattacatagctgtgattgtaacaaaagctatcagtgaaaaccacagggtgctrtgagattcctgtactttgttgggggagatctcatctaagttgcggggtcagggaaggtttctctgaggaagctgagacttggaggatgaggagtttagacaggccaaggtgggagtgtggggtaaaggggtggcttggcctgtggtgggaacagaggcagtcagcgtggttggattattaggagcaagaaggagagagaatggaggaggtgagatcagagaaacaggtcaactcagatcacgcagccttgaaacatttggtagggattttggacctcatcttgagaaacagctattgaagggtttctcgcagaagactatgatgatctgatttggctttgtaaaagctctctgggtgtattatggagaaatgcccccgatttctggcccctactttgcatggttagggttttgttctctatctcacgtttttgaggctcagattcatttaatggataaggcaatgtgcttgtaagtgccttggatgttcttcaatgtcttggagaagagaagctgtttccaaggtttgagccccactgctccatggcatggatcggatccatatgatcgtccctgttcctcttctcctggtggctgcagcttgccggatgtccatatcccgtggtggtgggcaactctaacacacagacggagttctgttcctggccgtcaaatctcaaacacgagttgagctcctcaatgcttctgtcttttcttgtgattgattcctttctaggatcacagctgccttcgagagactccagtggaacagcagtagctccagagaaccggcaccagccccccagcacaaactgctttggtggaagatcccggtaagaccccccttggtgaggacaaagagctaagaagttgcttagagctattgaaaacatgttgggacatggcggggaacattttatggtagaaactgttggagatttccagagatcttgtaactgactcagtagttaagaaagctaatagaggagtccagagcttaggatccttatttattttttttttaattgaatttggatttttaatttttgtttttattttagattcagggggtacatgtacaggtttgttacatgggtatattgcatgatgttgaagtttgggcttctaatgatcctattgcccagatagtgaacatagtacctgattggtagtttttcaattcttgctcctctccctccttgtttttggagtccccagtgtttattatttctatctttgtgttcatgtgtactcaatgtttagctcccacttataaatgagaacatatggtatttggttttctgtttctgcattgatttgcttaggataatggcctccactctccggctatattcatgtccctgcaaaggacatgatttcattcttttgttttgttttttgatatggggtcttgctttgttgcctacgctggagtgctatggcaccatcacagctcatagcagccttgacctcctgggctcaagcaatccacccacctcagcatcctgagtagctgagacagcaggcatgtgccaccatgcctggctaatttttttatttttgtagagatagggttttaccatgttgcccaggctggtctcgaactcctggactcaaccgattctcctgtcctggcctcccaaactgttgggattacagccataagccactgtatctgacttattttttattcttttttatggttgtgaaagaattcaggattcttagaagggtcagaggctccttgatgaagattgggactggctaagtaggttattggataaaaggaactgttgaacaggaaacttgactgcttttttgtatgtccggggctgcagccacagttattcttccaggatacacatagaaatgcttagagcaatggttctttgtgcaattttctgtcatgcattctgctttgggggtggcccatggttcccttgtaatgttggttaagacctcctacgcttagagtccaaatattatacttgttatacgtattacaaatgacgtaatgttatttactgaaattcccattttatacctgtgttagtggtgcaaactcatttccatggcaactgaacgtctaggcaggaaaatagttctaagtataaagagatgaggggagagggttggcacctttgtttattgtttattgcaatgtgcaaaatccccagatatttagaggacattttgaggaaaataatcttaaatgtacaaactacgaatgtagtttgtaaatctttatcacttgcggaaagtaggtgagtaactggcagtaaaatcttcccaaacgaggccaggcacagtggctcatgcctgtaattccagctcttttggaagatcaaagtgggaggatcgcttgaggccaggagttccaagaccagcctgggcaacctagggaggctctgtctctataaaagatagaaaaatgagctgggcatggtagtgtgtgcctgtagtcccagctacttgggaggctgaggtgggaggattgcttgagcccaagagtttgaggctgcactgagctagcatcagggcactgggtaacagagtgagactatgtctgtaaaaaaaacaaaaaaacaaaaaaacttcccaaacagaccctagggagggggaataatgctttgaaaaatggaatatgattttagccaatacccgcagcatcttaaaagatccctctgaggacagctgtcagcttctccagatttggttgttttgtgggcttatgaggttrtggtgactggcaagtggcgggagcaagacaagatggacgtttggatcttttttccgtacctttattagaagcagagatgccatttccccattctcttttctccaagtcactgtaaaggcgttgcctcactcccaaagaccagtcatgttttccgtgtctcggtaggtgacttacaatagttgggtctcacggggtgatgaatgacagtgtaactggcaaatcttgtgtcarcaaagccatgatgggcacctggaactggaggaaacaatttcttaagctagaacagcggtgggcgaggaatacttgagcatttcactcttttagagaggaaggaatacttgagtatttcactctttagagagtgatgccttctcagctttggtgctagtaactacatcttartcttttagctgagttggaaagtttgtctcaaacacacccatataacttaatttggggctcaaagtcagattcagctattaacaagtttggatctaaattcttgacctatttactggtctctgaattcctctagttgatcgaccttgaaattcagagatcctgttaaacctcgtttgttgtcattggtgttgagaatgacacsaggtcatcggtgttgcagcagccaggctgcaacaggaaatcggatgcattttggcccatcacacgtggtagacattcagtgctagttagttactggtgagcaaggtaccttccgatagtgtaagccttatcggagtcctctgcagtctgttagctgctgcaggcttttactacgtgtagcatctgagttttccctggcctctgccatctaagtaactattcattctgcactcacatggaacctgttgccattcagcaggaaatatttttgcaaatattatccaaaggctgtctctttgcctccytaaaagccccctttccactttgctgttgcaggtatgaaggtcactgtgcacacatgcttatgactgtaggcggtggccaaggagtctattggataaaggtgtagggctttggaatcaggagatgcagatcgaatcctggcctgtcatttacttgctatatgattttggataagtcacaaaacctctcggatccccagtttttttcaggtgtaaagtgggggtatcacctgtctcacagggttattgtgggaatgaactgagatgaggcatgtcagtcagagggccttacacaacgggagcactcggtggaagtggcagtgggttttctttgtatctggagactcgtttgtgcatgcctaccccccttccctgctaagcctgggaagtgaggcattaccggtgcgtttacatcaaggactgtagttgggaggtgatgaatcagacctttgggatcaagggcagtcctttgctgtccttgctttctgggggcagagagaatgatgggcttctgcctgctgtctcccagactaaatatttagcttttgctgtctgaagggtaggtttttcttggacttgggtgctattcactgtgatcaaacaaaggtgctctgacctgcccatgaaggtgaagactgcgatgtcaaagcaaccctttcctctccttctttcctctgcttggtaaagctgtagaactggaactgtgaaagggttttatctgaggggttcattcgtccaagctcatcccgcagagcaccacttgcttgctaagcaaggtctcacagctccatttcttagtgggatcttgcctcttcttcaagaataatcagatgaagcctgggcgtggtggctcatgcctgtaatcccagcactttgggaggctgaggcgggcagatcacttgaggtcaggagtttgagaccaggctggccaacatggtgaaaccctgtctctactaaaagtacaaaaattagccaggcshsgkggtgtgtgcctataatcccagctactcagaaggctgaggcaggagaattgcctgaacctgggaggcggaggttgcagtgagctgagatctagccactgcactccagcctgggtgacagagccagactccatctcaaaaaaaaaaaaaaaaaaaaagaatacttatctggtctggcacatggaagccagcatgggactgccaccagcaattcatgcggcatacatttgtttgcccacagactgtgttaatatggaatcagaggtctgattatgtaaagaaagagttatatcataaattgtcatacactcttataatggaatactgtctcacagtaaaaatgggtgaaaaatggttatatccatatggtggaatcttagaaacataatgttgaacaagagaagcaggtcatagaaaacagtaccatagtaggatgtcatacgtagaaagttgaaaaatgcaaagccaaacaatacaygttgtatggataccttcagaggcagtaaaactataaaaaatggatggggctgggtgtggtggctcacgcctgtaatcccagcattttggggaggtcgaggcggatggatcacttgaggtcaggagttcaagaccagcctggccaacatggcgaaacttcttctctactaaaaatataaaaattagcttggcatggtggcgtgcacctgtaatccctgctattcgggaggctgaggtaggagaatcacttgaacccccgaggtggaggttgcagtgagccgagattgcgccactgcactccagctgagtgatggagtgagactctgtctcaagaaaaaaaaaaaaagaaaaaagaatgggaataatgaatcctgaattcaggaggttatcttgggaggaggcagacaggtgtaatgagaaaagagtacagagaaagtttctaagatactggtcatgttgtttctttgcctgggtggtggctcccaagtgttcattattttattcttctttaaacgaaatatatatttagagtcttgctctgtcaccctggctagagtgcagtggctcacccacagctcactgcagcctcaaaatcctgggctccagggatcctcttgctttagcctcccaagtagctgggactacaggtgtgtgccaggccctacacctgctgccaggctctttttattatttatttatttatttttaaatttgagatggagtcttgctctgtcgcccaggctggagtgcagtgccacgatctcggctcactataaactctgcctcccaggttcaagcaattctcctgtctcatcctccrgagtagctgggactacaggcacatgccaccatgcccgactaatttttgcatttttagtagagacggggtttcaccatattggtcaggctggtctcaaactcctgacttcaggcgatccacgcaccttggcctcccaaagtgctgggattacaggcatgagccaccatgccctgcctttttatttatttttcttattttttttttttttaatttttttgagatggagtttcactcttgttgcccagggtggactgcaatggtgcaaactcagctcactgcaacttctctctcccaggttcaagctattctcctgcctcagcccctgagtagctgggattacaggcatgcgccaccatgcctgactaattttgtatttttagtagagatggggtttctccatgttggtcaggctggtctcgaactcccgacctcaggtgatctgcccgcctcggcctcctaaagtgctgggattacagctgtgagccaccgcgcctggccaggctctttttaataacccattcttgcaggttcccaacagagagaactcactcacccccatgagaggacattaatttattcatgagggatccacccccatgacctaaacacctcccactaggtctcacctcccaactctgccacattgggaatcaaatttcaacatgaattttggtggggacaaactgcatccaaaccatagcagggagtcaagttggaatgaagcccacaggactgtctgtgagtggagctgctcctcctagcacctcacgacttcctctggcttgaataactggctcctctgtctagaatctcagtaaaatttccatagtcatacagggaaatggaacaacaacaacaaaatgagaagaatgcatttaatttgctttttgattcataaaatttttcattaatagggattaacataagggatcttagttaagaagctgtcagctgggcgcagtggctcagcrtgcaggctgggtgtaatcccagcgctttgggaggctgaggtgagtggatcacctgaggtcggaagttcaagaccagcctgaccaacatggagaaaccccatctcttctaaaaatacaaagttagccaggcgtggtggcgcatgcctgtaatcccggctacgtggggagctgaggcaggagaatcacttgaatctgggaagtggaggttgtggtgagcccagatcgtgccattgcactccagcctggtcaacaagagcaaagctccatctcaaaaaaaaaaaacaaacaaacaagaagcgaagtgtcaatagctaggtgcagtggctcatgcctgtaatcccagcactttgggaggctgagttgggaggattgcttgagcccaggaatttgaggctatagtgagccaagatggagaccctgcaatccagcctgggcaacagagctagatgctgttgctaaaaaaaaaaaaaaaaaaaaaaaagaagctatatatagagccttcaacaatttattttcctttcttatgtgtatatgtatttaagctattttgtttaagaatgcatgtgaacgcacatgagagagtgtgtatgtgtgtgtttgtgtgtgcatgtaggcctggggaccttggatttgcctgtggccctcatcagctgtcagtagtggccagtgttggtcacaatctgcattttaagatgtctttcccagtgatttttttacatggaaaagtttcagagcctcttagatagttttctttctcactcctttactcttctttttttgtcctgctttgatgaaaacatatcagatttattggctcccttgccttggcattaacggcctctgaagatttaaaagatctgtaatctcggagacttataaagcctaaccgtctccggtgagctctaaatagatcatyaactgtgtctgcagacagcctatcccagaaaggaaagaaaaataaactcaggcgggtgtgagtccactgtgaacacttcaggaagtcctgggagggccgggggagaattgggaagcagagctagcagggaggaggggtggagggtggataggagctgagccttgggcactaggccattctcacagtcattgttggctggcggttgccacccctccttccactgaggtgactaaaggctgcttgattgggaactgcagttatttagagatgttgccctgtcagcaggaaagtcctcccatgcagtagcttatgcttaaaatctgggtattgcctcatttctgttgctggggaagacaatggaataagtgttatttatttatttatttattcattcattcattcattcattcattcattcagttataattaagacatagtccctgctcaaagtccctgcttgtaggcagggctttcttctgagcagttggtaaatatggaataggattgagacagtggtcaagggtcccactgcattctccaagccagacgttgaaaagtaatcatggctgggcatggtggctgtatgcctgagtcccagctctttgggaggctgaggcagaaggatcgcttgaggccaggagtttgaggctgcagtgagttatgatcgtgccactgcactccagcctggacaacatagggagaccctgtctcttaaaaaaaaaatcatggagattaattacacactcatttatacattggtttattttgcatcaattaaaatgatacatggtaccttattatacatttatttattgcatagatatttatttggcatttactctgtatgagcctagagagatgtttataatgccagatgtggcatgcgccagaaagctggttataaactaggaggaaggaaggcaaatctctgccgttgaaggcaatattcacttgatatacatgaatgccaggctctgagctgtcgtggtgattaaaagatgaaaagtcggccgggcgcagtggctcacgcctgtaatcccagcactttgggaggccaaggtgggcagatcatgaggtcaggagattgagaccatcctggctaacacggtgaaaccccgtccctactaaaaatacaaaaaaattagccgggcgtggtggtgtgcgcctgtagtcccagctactcgggaggctgaggcaggagaatggtgtgaacccaggaggtggagcttgcagtgagccgagatcacaccactgcactccagcctgggcaacagactgagactccatctcaaaaaaaaaaaaaaaatgatgaaaagtcagggtccctgacatcagggagtgtctctagtaggagacagatgcatggatgagttagagtctagtgtgatggatccatggtgatggtatgtacacatgcaagaggaatgtagtgggacattacctagatatgcctgggagatttggggaagacctcccacatttgagcagtattttgaaggagtttgccagaccgacgaagtggggttcagggatgtcactgcaggcagagggtacagcatgagtgaaggcaaggaggagtaagagaacttgatgtatttgaggaaataaaagtcatttagaaatgttgacatgtaagatattagggatgatagcgtagcaaactagggtttgcaggctgaatccagcctgccatctgcttttttgttggtgttcttgtttgtttstttgtttttgctgggtgaaatctgccgtgttttttttagagcacttttaggttcccccaaacatatatactctcttccccactatcaacatccyccaccagagtggtacatttgttagaatgatgagcctrcattgacacatcattgtcactcaaagtccaaaatgtatattaggtttcactctttaattttttttttttttttttggacagagtctcgctctgtcattccactggctggagtgcagtggctcaatctcagcttactgcaacctctgcctcccaggttcaagtgartctcatgcctcagcctcctgagtagctgggattacaagcattcaccaccatgcccagctaattttttttttttgtatttttagtagagatgaggtttccccatgttggccaggctggtcttgaactcctggactcaagtgatccgcrtgccttggccctcacatgtatccaccattactctgtcatacagagtagtttcactgccctgtgcttcatctattcatctctccctcccgtccccagcccattgtaaccactgatattttattgtctgcatagttttgccatttccagaatgtcgtatagctggatcatagagtatatagccttgtcagattggcttctttcacttagtaattgggatttacgtttctttcacgtcttctcatggcttgatattttgggtactgaataatatttcattgtctgcatgtaccacagtttatccattcacttttacattcctcctccacagtttattcattcatttactggttgcttccaagttttggcaatgatgaataataaagctgccataaacattagtgtgcaggtttctgtgcagataaaagttttcaactcggtcgggaacggtggctcatgcctgtaatcctagcactgtgggaggccgaggcaggcatatcgcaaggtcaagagatccagaccatcctggccaacatagtgaaaccccatctctagtaaaaatacaaaaaaaaattagctgggcgtggtagtgcgctcctggagtcccagctactcgggaggctgaggcaggagaatagcttaaatctggggggtggagtttgcagtgagctgagatcacgccactgcactccagcctggcgacagagcagcgagattccagctaaaacaaaacaaaacaaaacaaaacaaagtttttaacttgcttgggtaaatacaaaggaacatgattgctgggtcatatggtaaaagtatgcttagttttgtaagaaactgctaaactgttttccaaaacggctgcaccagtttgcattgccaccagcagtgagtgagagttcctgttgctccacatcttcaccaggtttgatgtagtccattttctggattttggctattctaatgggtatctagtgatatctcactttaatttgcatttcctggatgatatatgatgtggagagtctctttttttttttgagaaagagcctcactctgttgtccaggctggagtgcaatggtgtgatctcggcttactgcaccctccacctcctaggttcaagtgattctcctgcctcagcctcctgagtagctgggtggcacctgccaccacgcccagctaatttttttgtattttaagtagaaactgggtttcaccatgttggccaggttggtctcgaactcctgacctcaggtgatccgcccacctcggcctcccaaagtgctgggattacaggcatgagctgccttgcycggcctatgatatggagagtcttttcatawgcttatattccatctgtatatcttctttggcagggtgtctgttcaggtcctttgcccattttaaaaatctggttgttcatgttcttattgttgagttttaagcattttttgtatattttggatagcagttctttatcagatatatgttttgccaatattttctcccagtctgcggcttgtcttctcattctctttaccacctgtttttggaaatacagttttatttttatatggccatactcatttattttcatattgtctgtggctactttcatgctacgatggtatgttaagtagttagaacagagatcwtatggtcagcaaaacctaaaagatttacgatttggctctttgcagaaagtttgccagtccctggctgtaggagatggtttgaaggcaagagcagttcacaaagggtcttttgtgttttactgaggactgtagattttattctttggagacagggaaccagtggattttgagcaaggcaatggtaaggctatttctgcggtaaattattcaggaaagtagtctaatggatgaattcggagctatatcagttggggttcattgcaggaaacagaaaacactctaggtattttgagcagaaaaggatttaatatggggaattagatgcttataaaagtcactggatgggctgatgcaataggagtgaggggtctccctgaggtctttggttacaggctcacaggcttgcagctccagttcacatgccaagaaactactgtgcccttgcaaccgctttatgtatttgaagtgggtgtgcaggcgatgaggcatggtgtctgctggagcccctgccagtcaccaccaccacaggacaaatggcttctgccttccttctgctttccaacctttctgcaagaacttctcattggtgcaacctaaatcacacccagagcctatctgcaggagggtctggaagtcttctaggccctgcagtgcgtcagggcgggcatatgggatagaagagggtgggaatgtctgatacrgtggggctgagaccagactcagggactgacgaagaggactgttgcaggaactggtgaggttacaattgatgactagccttgggcagtagcgaatagagaggagacaagagaaatacctaggaggtgtaattaagcaggactgcatggctggctaatgagacaaggtgaagggtaaggagggaggggggtactsccagattcctctrctgtgctgtcattcatggagacaagagacgcaagaggcggggagctaatgaagatgtcactttaaaaccacatcycccatggtggtcggctttggtgttcagcagggtttatggaacattggtactgcctggctctggggcagagtcatttctctgaaagtgcacccataggaggaggaatgagaacctaactgaagagacacagagagaaacatcgtattcctgacagtgaaccacagggccacaataagggcacaattcagggcacgtgagtgctagttctacttgaaccagatctgtatctggattctactacttcttggtcctagaaaattgtgatcgaaaggggacaagtttagagagaagccaataaaaagagtatgggtgttggagaaatgactttctagtcttgagagcttggtagcttgaccatgtgctgatggaagaccagaacagaactggctgcaaatgctttagacagatgtggatggcgaggaaagaggggtgcttcagccatggtgtttgtggctgtggtttggtgagatgaggttcgacttttcctttcggattctgttggaactggatggctccttttaaagtgccaaggtctgtggaggtggtgatttggggtttggtttagtgactgcctttctggtggcatttaaatagcctaaatagaatgactcctttcaaacgttgaatcaattctgtatgtaggcttttctttttttttttaagtttatttatttttgagatggaatcttgctctgtcgcccaggctggagtgcagtggcacgatcttggctcactgcaaactctgccttctgggttcaagcagttctcatgcctcagcctcctgagtagctgtgactacaggcacctgccaccacgcctggataatttttgtatttttagtagaggcgaggtttcgccaagttggtcatgctggtctcgaactcctgacctcaggtgatccacctgccttggcctcccaaagtgctgggattacaagtgtgggccaccgcgcctagcctcttttttgttttttaaaattttgagacagggtcttgttctgtcatccaggctagagtacagtggtgcaatcaaggcccactgcagcctcaacctccaaggctcaagtgatcctcttgcctcagcctcccaaatagctgggactacaggtgtgcaccaccacagtaggctaatttttaaaattttttgtagagataaggtctccccaggctggtcttgaactctgaactcaagcgatccaccagccttggccttccaaagtgctgggattacaggcatgagccgctgagccccagccggcttttcattttgttttagataaaaatagtaacagaactaaaatctagaatttatattctgcttcacatgtactgggtttcatgaagtttttcttcacccttaacttattgaaaatatagtggaggtatttgtctcaatattcttggggtctgccatccttatttcttaagtattttttagttcacttcagtctgccctctgcctctatcattctgctgcaatgacagtcaccaaagcccccctgacctgtctgccagtttaacatcatggactagtcctctctagaaacattttgtgccttggtttctataataatgcagaatcccagagtgttccttttttcccttggttttattgatttttattacttaaaaaatgagtttgattcatgcgaaaaatatgtataaatgtatcatataagagccggttgcagtattaaatagggcagtcaagagaggtgttgttgagaaggtgacttttaagcaaagatttgaaggaggcaaggaatgtaaccatgaggatatctggggaaagagagtttgggcagaagaatggctgttggaaaggccttaagttaggaatgtgcctttggagttgaaggaacagtggagaggccagtcccactggagaggaaggggaagtggagtcataggaagagatgacactggtaaagggtggtgccagatcattctgatgaatttctgctttatgtatttcgaggttatttcattggatctagagtacaatttgacatatgtcttatggatgaatagaacgttttggccttatcttgttattcttgtttttagtgctttttctcttaaaatttatttggtctgaagccaggcacagtggtatgtgcctatagtcccagccactggggaggctgagctgggaggattgcttgagtccaggagttcgagtctagcctgggcagcataacaagactcccatctctaaaaaagatgtatatttatttggtctgacaaataaaaagtaacttaacaacgtgaatgactcttaaaagtattaggctaagcttaagaagccagacatagaagcttatgttctatatgattccatttatataacatccyggaaaaggcaaaattctagggacagaaatccaatctgaagatgtgggggcattggaggagggattgactgcaaaggggcacaaggaaattttgggagcaatgggaatgttctatgtctcagttgtggtgatggtaacaccactataaacatttggtaaaacttgccaaattgtacccttagaaagggtaaattttactctatgtaaattataccttaattttaaaaatcattaaaagacccatttggtggccaggtgcggtggctcacgcctgtaatcccagcactgtgggagactgaggtgggtggatcacgaggtcgggagatcgagaccatcctggccaacatggtgaaaccacatctcactaaaaatacaaaaattagctgggtgtggtggcatgtgcctgtagtctcagctactcgggaggctgaggcaggaggattgcttgaacttgggaggtggaggttgcagtgagctgagatcacgccactgcactccagcctgggtgacagagggagactctatctcaaaaataaaaaataaaaaaaaaatacaacaacaacaacaaaacccgtttggtgtgacgttaacctaactatcccagcttccttttgttttgtgtccacttggcatatttttttccctattcatttcattttaacctatttggtacttatattttaggtagtgtttttttgtaacagcatttaactagagttttaaaaaaccatatgattttaaactgtcacagttcatttatgtttctcgtgattcttgatatctttagagttgttttcttcctcttgttaatttctgtctgtcctacagtttctgtttcccatctttgactaactttccactttttttactttttttgagacagagtctcactctgtcgctcaggctggagtgcagtggcgccatctcggctcattgcaacctctgcctctggggttcaagcgattctcctgcctcagcctcccgagtagctgggcgcgctccaccacgctcagctagtttttgtatttttagtagagatggggtttcacctgttggccaggctggtctcgaactcctgacctcgtgatccacctgccttggcctcccaaagtgctgggattacaggtgtgagccaccacgcctggcgtaactttccactttccactgtgtttggtctgccttttcaagaaaagtcttgatgggttgaaggtatctttggctccctgactatttgataatggagtgtgaaattctgcatccagtggtgtgaagagagcaagagctcattgactggctcccggcctgaaggttttctgtttggccttatgctgagttttatatacagcatgtctatattttgggtctactttgtgtgttttgtgttttcaaatggcctttgaaggtcaactcttttttttttttttttttttttttgagacagggtttcgctctgtcacccaggctggagtgcagtggcacaatcacagctcactgcagcctcgacctcccaggctcaagtgatcttcccacctcagtctcccaggtagctgagactacaggtgtgcgccaccatgcctggctaatttttaaatttttttttgtagtgacagtgtcttcctgtgttgcctagtctggtcttggatcctctttcctcagcctcccaaagtgttgggattataggcgtaagctaccgcatccggcctaacagtacaactctataacgacaaaatgacacaaagaaaatttaatgaaattagtgaaaacctagagtaggatgtggtgcagatactcattattttgtagtggagaatgggagattagggcccggttggttttgttccttttctttgaaattttacctttagaaccagtaaaaaaaaaaagttttcttttaaataaagttatacatttttctttacacttagaaaaaggatgatgaattggagacttccgaggagttatttcttccacctggtttgtggtttttttggggaggaaggggcttgggggaagtggtgctgaagctttcactcaaacaccaggccacggctctgtgtgcctcattcatctttgtgtccccagcaggacctagaatagtgcctcactgcacgtagtagcagctcaataaatatttgctgagctgaaagagtctcgtgttcctgctcttcattcgccaaaacttctgggtgggtcatgttgctggtttacgttccctggcgccttgactcctgagatgcgataatttgaggaccacagagaagagggggcgccctttatcacagccgccttgtgcttgcaaggtgaaccaccaagagtgtgctggggtcccactgcctgcacagtctctgtggcttcatctgtttttttcttcatgattgatatttctgtgttgaatgcttttcaccgactgttcttttcaaatccttgcagcttttaaggttagtattggaatcagagaagaattgacacataaataagtcttgtttgggaaaagaaggtgtaaagtccgtgtacttcaactctgccasaaaagaatgttacttaccctctaagaataggtaatatctcatttatactaggtgttcaaattcccaagtgattattgaatcttaggattgagtgtctccttgaggacattaggatcactggaatgctgctccttcgacatgggcactggatcccacagagtgatgccataactgtatgagggctgctgaactagaccagcaagaactgggtcaaggctgttccctagtcatgcatgtatttgagagttccatcttctactgtggaaattgaattgtcatttatttgcattcattttctattgctctgtaacaaatcaccacaaactcagggcttaaaacaacaccatttattagctcacagttctgtaggtcataagtccaggatcacacggctgacttttcccttcagggtctcacaaggccaaaatcaaggctctggcaggacaacattcttatctgcatrcactggggaagaattcatatcaaaggtcattcagggctgggcacagtggctcacgcctgtaattccagcactttggcaggctgaggtgggcagatggcttgagtacaggagtttgagaccagcctaagcaacatagccaaaccccatctcaacaaaaaaaatacagaaattagctaggcatggtggcgcatgcctgtcatcccggttactcaggaggctgaggcgggaggatcgcttgagcccagggaggtcgaggatgcagtgagctgtgattgcaccactgcactccagcctgggcgacagagggagaccctgtctcaaaaaaaaagaaaaagaaaaaaaaagtcattcaggtccttagctgaatttagttatttgcagttgtaggactgaggtgcccattccttgctgaccatcagcgggggtccctctcaactccttaagcttccccctggccccgacccctgcattccttctcacggtgccccctccaccttcgagccaggaaaggagtgtcagatctccctgtgatttgaatctctctgattttctctcctgccacctgctggagaaggcgctctgcttccaggaggtgatgtgatgctaattagactgagagagcaccgccccccacccccgccccgcccgatgatcccctttcttaaggtctgctgtggtacacgacgacatacttgacgacatactcaagggtgtggcaccttgtcatattcacaggttttaggcattggaggggggctagagtgagagggatgtcattttagaaattctccccacagtagaaagactctctctaatgggccagccatggtggctcagacctgtaatcccagcactttgggaggccgaggtgggaggatcacttcaccttaggagttcaagacccccatcgctataaaaaaaaatcaaaaaaattagccaggcgtggtggtccgattccattctttaaaggagtcggggaggtgatgagtgactggattggaaagaatatgcaaagtactggaggttacaggcccaagagtgattttgaacctgacagcttgcatctttccttcattcaacagatatttcctgaatcctactgtgggccaggcacacactaggtgctgagtctccagaggttcacaaaacaagacatgatctctgccctcatgaatgtgtagtgacacatagcagtgccataaagggaacaattaggatgttatgagagaatgaaaggaaatttactgtagcctgggagatgagggacatttggactgagatttggcctaggartttggccacctgggtggaaagtccaggaagagaatgccgggcaagtagatcagcaaagggtctgactctcccttggtaggggtctagagaggtattttgagggatgtccattgaacatattctttttggagcctgcctccgtcctgctgaattcctgccttgtgatttgtcgtgtcagaacacttagaaataatgctctacccagctcatgcctctaatcccaacactttgggaggccgaggctggaggattgcttgaggccaggagtttgagaccagccaggacaacatagcaagactcgatctctagttaaaaaaaaaaaaaggaaagaaagaacactctaatatactgtagtcccccattcattcaaggtcctgtgtagtcctttctggtctggagctatagtaaaaggaggcagtgagtgggccagattcaaacagggaatgatgccagtagcgagaaagtgaagaggcttttctggcgcacctgtacaggttgtgctctgcattccttgggggccagccccatggagattcctcctgtgcacagtggaggttgatggggatgctcatctcctaagcggcaacagtgtcctatgcactcataattcagggtcaggggatctcaggtcataggacaaatcacaggctgctgtctctgttcagggtacctcaagccatcaatggccacgttgagcaggtgaacacttcccctctgaactctctagctctctttgaagtttgggagggcatttgagcactcttctcagctaagcccaacatacggcctggaagtagattggacaagtcaccatttactataccttctctctcaaggtgagtttttttagtctratgaaattgccacctttgagaaggttgctctgtactctagggtgcgcaaaaggaaattgtttgtcttccggaagtctttctgtaatttagaatggacttggcagcgattttatttttaccttccctgtcatttgtgaggctggcagtccagaggtagggtgtggaatggagccgtaaattgcgcttgcagtgaccagaaggggcccattttaactctaattgtgcctttcccggttcacttctccttttacccgccctctcctttttttttttttttctaatccacatttgagtggggaggaagaattgaggggggtgcaggtgggagtaggtttatttattggcgcttctctgggtggtggacactgtttcttttcccattacggcttccttttttattttttcatgcttctattttaagtgcctgtttctttctggttctgtcttgctggaaactggcccagctccactgaatttttttttccatgcagctattaaaagacaatgaccagttaagagtgtgctcagaggaaggacagacttgaggtggggagccctcttggttctagtaatcctaggcaaataccgcttacccggattggaatgtgagaggagttttattaggtaattttactttttgtgcctgttttataggaggaaaatcaataatcaggttgttttgttttgtttgtttgttttgagacagactttcgctcttgttgccccggctggagtgcaatggtgtgatctcggcacactgcaacctcagcctccagggttcaagtgattctcttgcctcagcctcctgagtagctgggattacaggcattcgccaccatgcccggctaattttgtatttttagtagacacgggatttctccatgttggtcagacaggtctggaagtcccgacctcaggtgatccactcacctcggcctcccaaagtgctgggattacaggcrtgagctaccgcgcctggcccttgttttgtttttttgagatggagtctcgctgtgtcacctaggctggagcgcagcagcaggatctctctcagctcactgcagcctccattccccaggctggtctcgaactcctgacctcaggcaatccaaccacctcggccttccaaagtgctgggattacaggcatgagccaccatgcctggccagtaatcagtttttataccttgaaacttctcttttgctgaacttgaataccagtgggcctgaatctggggtcaatgaacctccctttcatattctgggcctcttttaccaagatagaaaagtatgcttggaacctggtatccagccagccatgaattcttttttttttttttttttttttttttggaaacagggtctcttgctctattgcccaggatagagtgtagtggtgtgagtgtgatcacagctcactgcggcctcgacctccccagctcaaatgattctcccacctcagcctcccrcatagctgggatcacaggcacttgccactatacctggctaatttaaaataattttttatggagacgaggtctccctgtgctgccaggctgggtttgcactcttgggctcaagcagtcctccgcccttggcctcctaaagtgctgggattacaggtgtgagccgccacccccggcctagccatgaattctcggcatttgggagagatatgtccctagtctttatagaatcctacatgtattaatttagaaatgtttgtagggtcttgaattttgcctgaatcacattcccatccacattcttgctgtttttttgaccataccctcacgccatacctgccttctacaacttttgctcacttttacattttctccacaaatggcttttttaaattattaagttactataatttacaaacagtaaaatttacccttactagtgtatagttctgtaagttttgacaaaagcatacagccaggtagtcactatcataatcaagatacagaaaggctgggcgtgatggctcatgcctgtaatccttgcactttgagaggccgaggcgggtgaagtcctgaggtcaggacttcaagaccagcctggccaacatggtgaaaccccgtctttactaaaaacacaaaaattagctgggcgaggtggcaggcgcctgtaatcccagctacaagggaggccgaggcaggagaattgcttgaacctggtgggggcagaggttgtagtgagccgagattgcgccacttcactccagcctgggtgaaagagtgaaactccgtctcaaaaacaaacaaagaaacaaacaaacaaaagatacagaaagtttcatcaccccagaaagttccccagtgcccctttgtagccagctcctccttgtacccgtcgctgctggcaagcatggatctgtattctttctctaagtttgacctcttcttgaatatcttaaaaatggaaatgtacacgtatagcctttggtgtcttttacttagcataatgcggttgtgattcacctctgttgctgcatgtaccagcactttattccttttatgcattgagtttattccactatgtgtatgtaccacagttggtctactcattcaccaattgaaggacttggagttgcttacagtatttggcgcttacaagcaaagcctctatgagcttttgcatacaggcttttatgcaaacatgttttcatttctcatgggtaaatacctaggagaggccaggtgtggtrgctcatgcctgtaatcccagcactttgtttgggaggccaaggagggtagattgcttgatctcaggagttcgatatcagcctgggcaacatggtaaaaccccttctctaccaaaaatgcaaaaatgagctggacatggtggtgcgcacctgtgatcccagctacttgggaggttggggtgggaggattgcaggagcccaggaggctgcagtgagccatgatcacgccattgcactccagcctgggtgacagagtgagaccctgtctgaaaatattaatttttaaaaatacctaggagtagggttgtcagtttgcatgccaagcatatatttaactttataagaaactgccaaacagtttacaaagtggctgtgttcccgccatcaatgtatgagagttccaattactttgcatcctaatccagacttattactgtaagttgtataaaaactctgtccattctttttgttgtgggagacagagtctcgctctgtcacccaggctggagtgcagtggcacaattttggctcactgccaccttggcctctcggggttcaagcgatctcctgcctcagcctcctgagtagctgagattacaggcgccagccactatgcctgacgaatttttgcatttttttttttttttgagacagagtctggctctgtcacccaggctggagtgcaatggctcgatttttaatagagaaggggtttcaccatgttggccaggctggtctcaaactcctgacttgaagcaatccgcctgcctcggcctcccaaagtgttggggttacaggcgtgagccaccacgtccagcctaaaaaactttgtcaatcctgatagatatgtaatgatatctcattgtagttttaatttgcacttcccgaagaacttatgatgttgagcatctttttttgtgcttattttccctctgtagrtcttctttggtgatgtgtctgttcaaatcttttttttagtcggggtttggctctgtcgtgtaggctggagtgcagtggcgtgatctcggctcactgtaacctccacctcccaagctcaagccatcctcctgcctcagccttccaagtagctgggactacaggcgcttgccaccataactagcaaatttttgttatttttgtagagacagggttttgccatgttgcccaggctggtctcgaactcccgacctcaggtgatccgcctgcctcagcctcccaaagtgctgggattacaggcatgagccaccacacccagcctcaaatcttttgattatttaaaaaatattggggttgttttctgattgctgaattttaagagttctctatcaattctagataaaattcctttatcagacatatattgtcaaccataaaagtcacaaactctataaatttagaaaagagagcttcatttctaaagggggggtaccataacctgcaggcaggaagtggagcctctacctgaaaccaaaaagcaggcatttcaagggagggaaagatgagacagtaatttacgctaaactggttggctaagtttacatatttatcaggttataggagaagctataaatatttatgaaggggacacacatgcatgtgtcataaactaacacgtttgttacatgtgtcccttgttgccctttgagatggacacttaatatttaaatgtattactgttagaccctgtccatcagaaggtgaagcagaggacagaaagatactgagtgcacagcctccgtggcctggccagaaccacaccatagtcagtggcctcttatcagaaaggaatgcyggtcagttgctgtgtggaaaccacaaaagggaaggcagcgtgaggccattggttgaaatcagcagtgaacaagtcttttgagagggttgatttttgttcgacactgwggaaagaaagacttatggtggctagggaaggagggggtgtaacgaggtgtctctgacctcgcatctcatcatggctgggaattaaggtttttaaggtttctctggcgtcttcttggccaagagggggtccattcagttggttgaggagcttaggattttattattatttctcagtattgtggactgtcytgtcatttttttggacagtgtctttagaagagcaggagtttaaaatttttgatgaagccacaaaatgctttttaaaaaaakgtttcacattttatttattwatttatttatttatttatttatttatttatttatttatggasacggagtcttcctacattgcctgggccagtctcaattgatcctcctgcctcagcctcccaaagtgctgggattacaggcatgagccactgcacctagcctcattttattagatatttttgctttctacaaatttcttccctatttccccctctccctagctccttgcaaccatcatcccgctttctcactcaattagtttggctactccaggtaacatttaaatggaaccacacaggatttgtctttttgccacgggcttctttcacttagcagaatgtcctcgaggttcatccatgtggtagcctgtgtcaaaatttccttcctttttaaggttgagtaatactcatatgtatgcatataccatactttatccatttgtcgaggatgggttgcttctacctcttggctattgtgaataatgctgttgtctacctgcgtgtgcaaatatctctcctgaggtcttgctttcagttccgtatttatttatttatttatttatttatttatttatttatttatttatttttgagacggagtctcgctctgtcgcccaggctggaatgcagtggtgcgatcttggctcactgaaacctccgcctcctggattcgagtgattcttctgcctcagsctcctgagtagctgggactacagacatgcgccaccaggcctggctaatttttgtttttagtagagttggggttttgccatgttggccaggctggtctcgaactcctgacctcaggtgatccacctgcctcagcctcctgaagtgctgggattataggcatgagccactacacctggccaaggctttttttttttttttttaaaccaaacaaacaaaatcctgttttgtttaattactccacatgatctgttgcaaaggtgacaatggtcagcgaggctgcactgaggtaacactgtcacgtggtcagccaggctcactcaccagcaggtggcttccccaaagcagcattgtgtgctatgatagaaatttgtgtctcagcagaattacaaatcacagcatttccactaaggtggaagctccttgaggtcagggactctgttttatctctagaatggggcctaacactcagaaaaggatgattgagtacatttcagcggccctcatgaagggcgaggccaggtgtcccatgacacccaaggctctggctgtcagggtgtagctgaggatggaggccagggctttgaccatcaaagcttaaatgccaagtgtcagtgagcagctctgtcctggggacctcatctgtgtcagaaccactttggggagcgtgggtcctggtcgtggctggcctgccttcaggaggcctcagttcttgagagaggaccttgagtgaggacacaccgcatcctgagaagggcgagctacaaagagagctgaatttctgtaatgagttgacttaaaaccatttgtggagtttggcctgactggcactgccattctaactgctttctgcctgccctgggggctgtataactcgtcccctccccctaaatggtgagggggcttgggccaaggttgaagtcatgggcagagccgagcctggctgtctcagccatcaccctgcatttgtctgggtgctattttggcccacgatgtgtggtttcagcatctgggccagcttttcatyacaatatgatcccatcttttatgggttgagtgagttctccaagagaggaaactgccaaagagaggagttgcctcagatgttgaggccttttcttcctttaagcatcttattttaaaggtaacacaagagccaaaaactggaaactccagatttagggcaaggggagaatctggggagaggggatgtggtgtttgtgtgtgtgttggggggtggtggctggccacgggcagggaggtggcagttcatgcaaagtgrtcccagctgcccctagcttagggctgatcccgccctgcccagcccatcattcagggtaagccgctatcattagtggttaagtgtttctgaaagtattctctctccatgctgaccacatgccctttctgggaagggagggcagggccagggagtaatgggacccaccctattgtcatgcccagctgctctgcagagggacagggaacccggggctggagttgatcatggacatgtctgtctgaggggttgacagtgcacgttttgcaggtcctgcagctccctgaggggtccagcttgctcctgggggctgcaagttccaaatcagagaggctttttgtcctagtaaagggatccttggctgaaacaaaccttctattaaccaattttctccctcaagctctctgccctcaacacatacacatgtgcacacacacacacacacacacacacasacayasacayacacacacagatatacacacatacacacacaccagcttgctgagggctgcctgcctttccctttggaactcatttgtgctcattccacttttgaggaggagctgtggtgaaatgcttaaggtgaacatttcttcccatgaagtgggaactttgaaatattcatctttgactgaggtgtggttgacagctttttgttgttgttgttgagacagagtctctctctgtgttgtccaggctggagtgcagtggtacaatctcggctcactgcgacctccacctcccgggttctaagtgattctcctgcctcagcctctgaagtagctgggattataagcgctcaccaccatgcctggctaattttgtatttttagtagagatggggtttcgccatgttggccaggctggtctcgaactcctgacctcaggtgatccacctgcctcagcctcccaaagtgctgggattacaggcatgagccactgtgtgcggccaacagcttttgatttatgaaattagctcagggaaaaagttaaggtggaaaaagagagtccacattgagtatttccacagttcagtcgtactctgtctccattgccatgcagtgtttaggtatgagggactccagagtttgctacgtttctccctttttctccttttttttttttgttggggattgggggcaagaaaaacttaattttttttttttgttaaacaaggtctcactcttttgccacgctctcaggctgaagtgatcctcctgccttggcctcccaagtacctgggaccacaggggcacgccaccacacctggctaattttttaaattttttgctagagatgaggtctccctgtgttgcccaggctggtctcaaactcttgagctcaagtgccgtcccatctcagcctcccaaagcgttgggattacaggtgtgagccactgcacccagccaaaaagtcatgtttttttccttactcacaagtatacaagctcaatgaaggaagctggaaaaatctagaagagcacaaaagggcttctttattcccaatatccaaagataatgacggttaagattttggtttatgttcatcttgtcaaattctgtttcttactttagagaaggtagctggtctgggtggttcatatccctcaaggagcttcctgttgactgcctcaacacactggaccaaagactcccagcagggttgttctgctggaggtggatcctcccaatggggaactttctattatagctcttaatttcaccattgtccaaatgaccaacaaaaaaatagcccaagaggaatttagcttgagttcaggcttcctgtcccatcttctgacctaagagcctaggctcttgacattaaactgcctgtacatgaatctttgcatcatttggcttactttctgtagagcttctctgtgtctgtttgcttatctgtaaagcggggataataatattaatctacctttagggttcccatgttaaatgagaacatatatgtaaatgcatagcacacacagtgcctggaacataawgttagagttcagtgaatattatatacttctgtagccattattattacctttatttatttatccttttttttttttttttggagacactctcactcactctgtcacccaggctggaatacagtgacgtgatcttggctccctgaaacctctaccttctgggctcaaatgatcctcctacttcagcctcttgagtagctgggactacaggcatgcaccggtagtgcagctagttttgtttattttttgtagaggcagggtctcattatgttgcccaggctggtctcaaactcctgggctcaagygatcctcccgccttggcctcccaaagtgttaggataacaggcgtgagccactgtgcccagccacctttattgttgagagtagttttatcgccccatgttgcatggtacaaattgtctctgggtctctgtttctctgtctggagaggggtgatcttttcttcactggatggtatttgaaacatctcacagttgcaaagtagtagatgcttactaagtagtagaagagcctcgtttggtgaaacagatgaaccgaaggacagggaggcttagacattttcactgagtgggcaaagtcaagctgcaaaaagaacttgagagcacatgctgcctgttgccttgtgttctctgaagatgtctgataggttttctgctgctaaattccacacttttctttgtgatttctgcattgcttctcatttacttggatggattgttgagtcatcttttctagataaaacatgtctaggccaggcatagtggctcatacttgtaatcccagcactttgggaggctgaggtgggaggatcgtttgagctcaggagtttgagaccagccttggcaacatagcaagaccccatctccccaaaaataaaaaaatgagccaggcgtggtgctgtgtgcctatagtccagctactggggaggctgaggtggaaggatcacttgagcccaagagtttgaggctgcaatgagctatgatcgtgccactccagcctgggcagcagagtgtgaccctgtctctaaacaaacaagtgaatgacaacaacaaaaastgtcaacatatgcattgactaaaagttgtttaatgccccttgacttttattgccaagggaatcatctttctagctatagagaaaattgctttggataagttttgagctcttcttgcctaatgggggaaatatttcatctgagcctgtccagtgattcttgtttatttgtaacatttgagcccaataaaaataatgtgatggtcacaggatattttgccaattatttcagatgtaggggcaattcactctggatttgtttacttgaagtggaaaagtttacacaaagttaccttctgagcttttaccaaaaaggaaacttccctgggtctctctgcttggaaccagcttctgtttagtccaaaactagaggggctattaaaggtcttgtttccaataaatggcaggagaagggaatatgatgacttaggtaggaaacacttctgtccttttcacastgacttatgtctgtctgctttctactttgaacccccaggacgcacagacattcgggtgcttcagccagaacaaccccagcaaccggcgagcaaagccccggtgctcggagccggcaccgccagcccgtcaagaactcaggccacagtggcttggccaatggcacaggtgagtgatggcaccgcacgccagcctgcactgaagctgtgggctctcacccgttctaacgtggacacgggatcctgcccactgtgtcagaatagagggtgggcgtcagaaggctctaggactaaactggatttgaatccatcagtctttctactgacccatcttcttctctctctggcatattctgtacagccaaggttattctccatatgactgcgctcttctaaaatactcatttgcacagaaataaaaagtcttgtctttctataaagacaataaaaagaaatgtctttttttttttttgagacggagtctcaccctgtcgcccaggctggagtgcagtggcgygatctcggctcactgcaagctccgcctcccgggttcatgccattcttctgcctcagcctcctgagtagctgggactacaggcgcccactgccacgcccggctaattttttgtgtttttagtggagacagggtttcaccgtgttagccaggatggtcttgatctcctgaccttgtgatcgcccgtcttggcctcccaaagttctgggattacagacgtgagccactgcgcctagcctttctattcatttcttatctgcattggatttcatgttggggaggatatctcatttatacatagcatattttttatttccttcacgtaagggaattatcagactaaggaaatgtaggactaagtattgttgctaagagctgagtcagatgatggcaccactggtgaatgggttgagatgctgactggggcagagccaggtaactacttgggggtgtgcaggggccatcccgatgggggccccatttgagaggagacagtgccgtccacgtgcgcatggaacttccccacacttggctctgcttccccgtaagtgagacgggaaggacctatttcaaaacaactcattttccgtcctgctctccctctctctcatcaggacagagtcaaaaaggaaaaagaaaaaacaaacccattcatttctataaacttctcaaagattgtcaaatctttagagactgctggtcgtttggtagtttgtcttcatttcgggcagttgggctgggatgtagatgtttcgcttggatgaattgtaggtagaggaatgcaggtgttgaaatttggtaagtgacgctgagatagttttctagtgctcgtgacagcagaggtgtggcgtaaaggccaggagacccagagcagcatggcttttcacggaagtgttgttgtggcattgttaagtgacctctgtgacaaacttactgagtggaagaaattgatttgggttcctttgcaatacccttcagttctgtggcagcaccatatgggggcttcagagtccccgtggctgctgctgttgcctgggtaccctgtcatcttctgtggaccacaagatggagtggtctgtgtcctacaaagcgcactgtgagtgcagtggcctgacctcctccctgaagtttgggagctgcctgaaggacttgagtgaactgactagcccaccctgagccttggggaagaggaggagctgcaggtggggagtcccagggctgccgtctcagctgcctggcgcccctgtgccacccactgtatccttktgctggaacatccggtggtagctgagcctggccttcctgtctgtgtgaaggagacagcaaagtgatggccgtgagccatagtatagagaaccataggcagctctgcgagcatttttctcttagaaaactcagtggcttgtggaggagggcagtgtttacaaatggggatgggggactggcttttaggaaccagctgattcccaggtgccatggcagagctactagcagctttgttctgccagatgcctgtgttattgagatcatggtttcccgcagctacctctgcttttcctataaaaactattggtgaattgattttctttggtgatggtccttgagtcactcttggacatttcaatagagctrtatttcccctacatttatttttaggtaccattacttrttgtccttatctctaggaaccttatgttctagcagacaaggcaggtgccagccgtgtcttcaaaagccaggcgtctctaaccttggactgccttggaagtgtttcatggtggtgtctctcagtgcccaaacctgttcctaagatccatctctgaagggcagttgtattttagggatttctgcccactccagtgctgagggcttgatgtccatctctcccctttctgctgtgatggtggttcacctttacctcacaggcagcctgtactttatataacgtctgccccaagggtacagaacagtgtcacctttgccgtggggagcaggcagaagctcccctcttcagcagcgcaggaccagaggggggtcgagggtgtgaatgaggacatcttcatccctcgggctgctgctgtgagaattctgaggaccagttccaagatggtggtggtggggagctctgcctcctggaagagtttccacagacttgcgagatttatttagcagccttttttggctgcgcactgcagttatgcatgaaaaagaaatttgaggccaaaccggagctgggttccaggtggtttttttatgttgtcacaaccataaagtatccatttttataaaacaagagtgaatggcagcccgtctgtataaatattatatttctaagttttagaagtggtggaatcaagaaatagacgaatggcatagcccttcattgagacttgtatgggatgatttacttgctaattctttattgaagactttacccccaaattttacatattttacttcttccctaaatgtaatttccatacacatcagtcagaagttgcatcagccgtggtcagattccgattcttcatctttaatgcgtttaaggcccagtgactcgctaggtcttagttttctcatttataaaattagggcaaaagttgggcgtggtgacatgcatctgtagtccctgctactcaggaggctgagccaggaggatcgtttgagcctaggaggcagatgttgcagtgagctgagatggcaccactacactccagcctgggcaacagagtgagaccytgtgtcaaaaaaaaaaaaattacagcaaaagtatatatctcataagttgtcataaggcataaattacagacacaccttcaagatattatgggtttgtttccagactatcacaataaagtgaatatcacaaaaaagcaagtcacatgaattttttggtttcccagtgcatataaaagttatgtttacactatactatrgtccataaaaggtacaacagcattatgtctaaaaaatgtatacactttaattaaaaaatactttattgctaaaaatgctaacaattatctgagcctttagccagtggaaatctcttcactggtggaaggtctctcctcgatgttgatggctgctgactgatcaggatggtagttgttgaaggtcagggtggctgtggcaatttctaataagacaacatgaagttcacagcatcagttgactctccctttcatcaaagatttctctgtagcatgcgacgctgtttgacagcattttagcaacagtagaaaatctttcaaatttgcagtcaattctctcaaactttgctgcagctttatcaactaagtatatggaatattctaaatccttgttgtcatttcaacagtgttcacagcattttcactagaagttgattccatctcaagaaactgctttctttgctcatccataagacacaactcctaatctattccagtcttcttatgagattgaagcagtttagtcacatattcaggcctacttcttattctagctctcttgctatttccaccacacctgcatttccttcctccactgaaatcttgaacccctcagagccatctatcagggtttgagcttcttccaaactcctgttgtgttgatatgttgacctcctcccatgaatcacaaatgttcttaatggcatctagaatggtgagtcctttttagtttttatttattttttatttttttatttttttgagatggagttttgctcttgttgcccaggctggcatgcagtggcatgatctcagctcactgctgcaacctccgcctcctgggttaaagcagttctcatacctcagtcccaggagtagctgggattataggcatgcaccaccacacccagctaatttttgtattttcagtagagatggggtttcatcatgtgggccagtctggtcttgaactcctgacctcaggtgatctgcctgccttggcctcccaaagtgctgggattgtaggcttaagcctttaggaggtttttaatgggttttggccacatccatcagaggaatcatgatctaaggcagttatagccttataaaatgtatttggtttttttggggcatgttttttgggkttttttttttttttcgttttttgtttttgagatgcagtctcactctgttgcctaggctggaatgccgtggcatgatcttggctcactataacctacacctcccgggttcaagtgattcttgtgcctcagcctccaaagtagctgggattacaggcatctgctaccacatccggctaatttttgtattttagtagagacagggtgtcatcatgttgggcaggctggtctcaaactcctgacctcaagtgattcacttaccttggcctcccaaagtgctgagattataggcgtgagccactgtgcccagccataaaatgtatttcttaaatagtaagacttgaaaggcaagatgactccttgatccatgggctacagcatggatgttgtgttagcgggcatgaaaacaacattaatctccttgtaaatctccatcagagctcttgggtaaccaggtgcattatccatgagcagtaatatgttgaaaggaatcttttttcctgaacagtaggtctcaacagtgggcttaaaatattcagtaaaccatgctgcagacagatgtgctgtgatccaggctttgttgctccatttataaaacacaagcagagtagatttagcataattgataagggccctaggattttcagaatgttaagtgaacattggcttcaacttaaaatcaccagcaacattagctgctaagaagagagacaacctgtcctttgaagctttgaaggcatgaacttctctttatctatgaatgtccaagatagcatcttcttgcaatagaaggctctttcgtcaacattgaaaagctgttgtttcgtgtggccaaccccgtcaatkatcttagctagatcttctggatagcttgctgcagcttcttcctcagcattttcttcacttggacttttacgctgtgtttgagggatctttccttaaacctcatgaaccaatctttgctatcttccaacttttcttctgcaacttcctcaccactctcagccttcatagaattgaagagggttcgggtcttgctccagattaggctttggcttaagagaatgtcgaggctggtttgatcttcttttcagactactccctatcgctttctccctatcacttttcttggtaaggctgttttactttcttatcactcaagtgttcatcagagtagcacttttaatttccttcaagaacttctcctttgcattcgcaacttggctaactgtcacaagagtcccagctttggcctgtcttggctttcaacccaccttccttatcactaaacttaataatatctagtatttgatttaaagtgagagacatatgactcttccttttgcttgaacacttagaggccaatgtagggtataaggagagagagagagagagaacagccaggtggtggagccgtcagaacacacacaatatttattattaaatttgctttttatttatttatttatttattgagatggagtctcatgctgttgcccacgctggagtgcaatggcatgatcttggctcactgcaacctccgcctcccaggttcaagcgattctcctgcctcagcccccccagtagctgggattataggcgcgtgccaccgtgcccagctaatttttgtatttttagtagagctggggttttaccatgttggccaggctgatctcaaactcctgacctcaggtgatccacccgcctcagcctcccaaagtgttgggattacaggtgtgagcyaccgtgcccagcccaaatttgctattttatatggatggggtttgtggcactgcaaaacaatggcaatattaatatatcaaagatcactggtcacagatctccatgacggatataaataacaataacgaaaaattttaagttggaaaagtttgacatattctgagaattaccaaaatgtgacacagagacatgaagtgagttcatgctgttggaaaaatgattgagaaatagacctgctggatgtcaggttgccacaagccttcagtttgtaaaaaatcacatagtgcaactcaacaaaacaaggtatgcctgtatataaaacatgcagagtgtttggcagggtgcctggcacagagcttttatctttatgaataatttcatggagttttaattatgcagcatgaatatatacatttttcacttcatttttcttttttaaaattttcttatagaatgggggtctcattttgttgcccaggccggtctccaactcctggcttggatcgatcctcttgtctcggccttccaaagtgttgggattgcagacgtgagccactgcacccagcctgtttttatacatggtttcatgtatctatgtgctcttctttgctttttaaaagtgacctcatactattttgcagttaatgttccataattcatctaaccattccttaattcttgtgtatttccctgttacaaaattctgctgtaaatacctgtatatagctttgtttcttgagtgaaattcttaagacaaaggatgtgaattttaaaaatgagctctagtgtgtattagcagaccgtctttctaagaggatcaatcatatatccaaagtagtataaaatattcataaagtggtatatgaggtttattttttctgcagccttgtaaatatcggtttataattttttgctaatagtattaagtgccacctcattggttaaaaagtttaacctcgttgcgttttctcatttactagttgcttaactatttcttttttcttgtgtctcttttcatagtatttgatyatttgtccttccgagatttagaagtttattttagaggtttatataagttcttagtatattctaggtacaatttttaaaaattgtagtgaaaaacacataacatgaaatttaccatttaaaccatttttaggtgtgtaattcagtggcattaattataatcacaatgttgggtaactataaccaccagtgtccatttccagaactttttcatcatcccaaacggattctctgtatccattaaacaataacatttccccccaacctgaccggcccccgcccacagcccatggtgacccctattctcctgtttctgcattttcttattctagatacctcatataagtggattaacgtgtccttttgtgtctggcttatttcacttaatgtggcatttttgattcatccatgttgtagcgtgtgtcagaatttccttcctttttaaggctgaataatattccgttgtatatacataccacattttgtttctccattcatctgtagatggacatttgggttgtctccaccttttggctgttggaataatgcgggtgagaacttggctgtacaagtatctgagcccaagatttcagttcttttggttgtatacctaggagtggaattactatggtgattttgtatttaacatgtcatgcccatgctaatgggcatgacgtgtgtagctgcaaattttatctgttacatttataagttttcccatatcactgttttgcattttatcttacttctgtgagtattgcagaaaaggatttaagaattttaaaaataattaggcctgtgcatttaaaaaatgtgtataatttcggtttttgcgtcaataatgtaaaagttcttatctataaaatgagatacttttttttttctttatggccacattggttctgcagagataaatacttttttctgttttcgcttgctttcttcatgatgttacgttatcaaaataaatatcccattagaatttatagtgttatatgtgtcactataatatataactataaatatgtatttatacataatatatattatatagacatgtatataaaatgaggactgggtctaaattattttctatgctgggatcctattgtcacaaagacattaagtaaacagtgtcattttttactgtgattttttttttagtgttgatcacttttaacattcttacatacagtgagaatttgtttcttgttttgagtaagtcccatatgatttttattactgatgtgttatcgtattttctttaatgtctggaagagctagttttgcctttttttcctccatgatattctttgatcgttcatacattttcaaaacaaatttcagactttgaattctttgaagcacagtaggatgtaagtaggaactgtgttcatctgtatatacaccggggaaggattttaccttcccatcaatcaggtaacacagtatggcttcgtccatttttaagttttgctccttttttcctcacgtaatataactgtttttctttatatgagcttcactcatcccatgccgtgctaattacgaaatctttgtccagttttggttgctgtcgtgaagagccgactgatcagctgccttggcagtgcagttgcttgtgtttcacgggtgaaagacaccaactgctttactgtggcccacatgttacgagctgatcttcagtagaaagaacttctgttgttattggtgctggctttctacgtgcctgagtgcagggccgagaagtcctgagtgtccaccacgagtctgtgatacaccacacgcacctaagcatcttggaacacacagtggactggcagtgtctctaggattaagcaaaagaatttccaattcctgatcttttttttggctaactgtgactagagtgtgtcccagtcctgaatgaatatgtgattcataaagttagaatgtttcaccaacatcacagagggaaccttgtgaaatacccaaggttatagaaagcagaggccatgcaactgccatcttactgcttaccatttggtaccccactttccctccttggtaccccactttcccggtccttgataccctacttttcctcccatttgggaaacatcaaagctgtcttcgctccccacgcccactgtttttacttcgtggtgttctggtttgagtactggttctgctacttgctgactgcacaacacctctctgagtggtccctctgtgagcctcagttttgtctgcagtgaaatgggaataataatatcttcctcataagggcattgggaggatcaatgagctaataaaagtaaacttgctaaaggcaatgcaggatcctgggttggatcttggaacagaaataaaacattagtgcaaaagttggtgaaatccaaataaagtctggagtttagttaatagtagtatactaattattattttagcattggcaaatgtgccatgattatataagatagtattattaagggaaactgggtgaagaccatactatcttttcagattttctgaaagtaatatccaaaattattccaaaataaaacaaaaagaacctgtggttttaaattttttaaattttttattttttagatagagcctcactctgtcacccaggctggagtgcaatggcatgctctcagctcactgcagcctccccttcctgggctcaagcgattctcctgccttagcctcccgagtagctgggactacaggcacacgccaccacacccagctawttttttctatttttagtagagacagagttttgccatgttggccaggctggtcttgaactcctgacctccagtgatccacctgccttggcctcccaaagtgctgggattataggggtgagccactacgcccggcctaatttttgtatagatggggttttgccatgttgaccaagctggtctcgaactcctggcttcaaatgatccacstgctttggcctccgaaagtactgggattacaggcatgagccaccgcgcccagcctaagttttgtatttttagtagagacggggtttcaccatgttgaccacactggtcttgaactcctgacctcaggtgattcacytgcctcggcctcccaaagtgctgggattataggtgtgaaccactgcgcccagcctaaagaacctgttttgtaaatgatattgttatacaaatgtcaggtggttttatttcaaatatctttcttttattttttagtttttaattttttttatttcttttcttttccctttgaaactcacctattcaatcaaatatctttcttttgctagattattgggcttattgaataagtatttcttgaacaaatatttatcaaatgttaagcattacggacaatgtaaagcatataagataaggcctctgccctatgatcttgttccagaaaagaagttgaaaccacacatcagcaaagtcaaaacagcatgtcacaggggctgtgcgactgtgtagctgagaccatgggtgctgtgggcttcacagtgtggagtgctttccctgggccgcaggggtcgggagggcgtccagggaagaaggccgatgtgggcaaagagatgcagcaagaacacaagggacagagagtggaagtagtgaaaaatgcgggaaacaaatctgccctcgctctcaagatgggtgcagtccttttggggagatatgggtgtacatcaaataattaggattaaaagttagagaacattggctatattgaatacagttaaaagttaatacagcagaccgggtgcggtggctcatgcctgtactcccagaactttgggaggctgaggcaggcagatcacttgaggtcaggagttccagaccagcctggccaacatagtaaaaccccatttctactaaaaatacaaaaattagccaggcgtggtggcactcgcttgtaatcccagctacttgggaggctgaggcaggaggatcgcttgaacccaggaggtggaggttgcagtgagccaagatcatgtcactgcactccagtttgggtggcagggtgagactccatctcaaaaaaaaaaaaaaattaatacagcaattctgtaaggcatgatggacttgtaactccttgtcttcgacaatccagtttttctatttgaagcctcattagacttgagtatggtgccctgtccctggttgaccagggtgaccgtgggccagtaatgtattgttagaacttaatttctgctgactatgagttgtgatggggtggattgactcctgaggttctttcaagctttcatgttctaagaatgtgcgmacacacacacacacacacacacacactcatttactcctactttttgagggcagaagaagggtactcgtgagtattcgtgggcacagaaggcttgtccatgctaggatatctagccttcatatttttctgtttccaaatctgaactcaaggtayagcacaaactttctttttttcaactttaagttccggggtacgtgtacaggatgtgcaggtttgttacatcggttaaacatgcgccatggtggtttactgcacagatcaacccatcacctaggtattaagcccagcatcggttagccattctttctgatgctctccctccccgcaccccaccctgcaaaaactgttaaacagaagagctactatgggtgaaccaggttgactcagaggctcttggttaggcctgtggacatgtacagccctggagggaaccttyctaactagatttgcagctgcataaacagtcagatccgagtagtgttgattggagggtcttctgccctggcatgccatgggggctctgcttttgttcttttcgtggtcagctatttcgtaataattatttttaatagttatatgttactaaaactttaaaaaaataaaagcttagacagtataaagaatgtctttttcctattctgctcaccttcagtttcctcctccaaggcccactgttgtgtttcttgcggttctttcaaagatattcttggaatatacaagcgtatgtatatatattccttgaaaaaacacacacatgtgtatgcacacaaactcacaaatgatagcacaattatacattgttctgcactttttcgtttagtagttatcttagaatgttcccatagtatttgaagctaacttgaagagcttcgttcacctcccctttccccactaactccagccaaggatggggacaattttaggatcaaaaagaatattaggctgggtgcagtggctcatgcctgtgatcccagcactttgggaggctgaggtgggaggatcgcttgagctcaggagtttgagaccagcctgggcaaaatagtgagaccctatctctacaaaaaataaaactaaaaattagccaggcatggtagcatgagcctgtagtcccagctgcttgagaggctgaggcaaggggattgcttgagcctgggaggtcaaggctgcagtgagccataattgtgccactgcactccagcctgggtgacagagcaagaccctatcttaaaaacaaaaaacaaaaaacaatggattgaaatattttaaaacatatttgaatccagtgcctcataaagattcttaaacaaaatgaaacctcattgttcatttttagaggatgcaaggaaatcaactcattctgaagactggtaaacaaagggaaagaagcaagcatttctcctgccttttctttacaaactgaacctccaggaagccaaatagttgatatggggaggtttctctttacagaagtattgtagctaataaatgaagaaggtgtggtagaattagaatattactattttgcaggcttcagtgaattatttaattatttaagcctatttctgaactttcttattaattgacacttgcctattcatacatcagtaccacattgttttaattgctgtagctttgtagtatgttttaatactttagaaactccccctacacacrcacaccactcttttacaaactcctcctacacacacacacacacacacacacacacacacacacacacacmttcttcttctttagaatgttcatggctattcttgtgtatttagttttcctaataaattttagaataaattcatctagctctgaaaaaagtcatagtgttttttttaaaattgagtaaaatgtatagctgtgcataaagtgaattgccatctgttgtgttttactggcttgcctgagatagaataggaatataaatatcaagccttgcatttctgttagggaaacattaattgcacaagatttagtcatttattaaacaactaatttagcctgtgtaccaggcaatattttatatacttcagagaaaacaagcaaataaatcatagccaatttctagcatcaggctcttacctgtttgttaagatctagcttggtatccatcacatcatatgaagaaatttgactttcagctgaccaccagttccatgtgtgccaatttttacatggttgctaagagttattataatcttcggttgaattagaggatgtgcagagagggagaagtggagcatagtgacaagtggtttaggctctggaggcagacaccagggtgtgaattaggtgctatatgaccttgagaggtgttgtagcctctttgagctatagtttccttaagtgttaagtggggatatcaattgtaactaacttgtggggttgcgtgtgaggcctaaatgagataatctaaagtgctttgcacctttcctgcacatgctggtgttctggaaatgttacctggtatttaagttggtaatctgactctgctggcctcatggtatctgatttattatgtttagttcctgatatgattagctagaagaggcagtagatgatatctcgaagagggcagccagatgatcgggaaaggggggttgcctagaaacactgaagaaatggtaggcctctttactagaagagggaatactaacatgaaacagtagccattgattggttggttgattgattgatgggtctcaccctgtcacctaggctgggttgcagtggtgcaatcatggctcacttcagcctccacctcctcagctccagtgattctccctcagtctcctgagtagctgggaccacaggtgggcaccaccatgcccaactactcttttaaattatttgtagagatgagtcctcgctaggttgcccaggtctggaattcctgggctcaagcaatcctcctgcttcaggctcccaaagtgctggaattagaggcaaagtatctaggtatccggcctagatactttgaattgctttggagatagagatggggagactcagaccaggtaatagaatcagcctcacatgaagaaaaaaaaaaaccaaacaactttctgggccaggtgccctggctcatgcctgtaatcccagcactttgggaggctgcagtgggcatatcacttgaggccaggagttcgagaccaacctggccaacatggtgaaaccccgtctctattaaaaatacaaaaattagctgggtgtggtggcgcacacctgtaatcctagctacttgggagactgaggcatgagaattgcttaaacctgggaggcagaggttgcattgagccaagatggcgccattccactccagcttgggtgacggagcgagactgtgtctcaaaacaaaacaacccctcaccaactttctggcaagtacatctgttcaatgatgggatgattctatagtgagctccctgtaagaaacgttcacgaagaatctggatagccacttgttagggatacaacaaaaagaatttctgcattaggaagatgaggctaaatgatgactaaggtgttttcctatgaatttctagtatacatgtacacatatgcaatcatatatatggaaaattctctgcatatagcttatcacttccaaaaaaccacagttctttgaaaccttatttgatccttttttgagttagaggatattgcaatgcaccttggggtccttgtgaacgtaagtgatcatcaaagaggtgaagagatggtgaaatagggagacttggggactagtgtgtttcacttctgtctcattgtctattatctcagagagaagacccttagctatgagcccttcttgcttcctactttgagcatgagcctttacaagaatgagcacattactggaagttttctgcctctttagtgtgtatgagctttttgaaagaaggtgctagtcatgtctagcaaacaaatgacaaatttaaagaaaaggatgtgaccctataaacttggccttgctgcatttagccccaacactttttttttttgagacacaattttgctgtcaggcaaattttttgcaaggctggagtgcagtggcatagtcttggctgactgcaaactctgcctcccgggttcaagcgattctcctgcctcagcctcccaactagctgggattataggtgtgcgccaccatgcccagctaaattttgtatttttagcagagacggggttttgccatgttggccaggtggatctcgaactcctgacctcaagtgatccgcctgcctcagcctcccaaagtgctgggattacagttgtgagccactgcgcctggccccaacacattcctgttatgttgatctttcctgctactcttttgttgcaataaatgtaaatgtaaccacagtatgttagaaaaacttgataaagttatgtaaaaaaggtagtgttaatatatttatttcggattcatcctgatttcctttggacaggcattaatgacttgctgtacttttcaaagtcatgttttgtaaaactttttgctgtcgcccaatacatgtagtgtaacattgtagataccatsttagcctattaagtgaaaaacctagcaagtataaataaaattctcattcttagttgatctttaaagtatgatttgtgcatcttcagtgaatgatgaacccacaacagccactgatcccgaagaaccttccgttgttggtgtgacgtccccacctgctgcaccyttgagtgtgaccccgaatcccaacacgacttctctccctgccccagccacaccggctgaaggagaggaacccagcacttcgggtacacagcagctcccagcggctgcccaggcccccgacgctctgcctgctgggtgagtagtcttctgtcccataacagatctctcctcctcaaagactgaggctcctttacgggggtggaaacaacgtggttatttattacctagtggctagtagcctctggggaggctgctgtgcattgaagcaagggaggtgtggaagaactgcttgttctacataaatcttaaaaagaatctcagtcgcctggggcagaatcaatgctaccttgtactgtgacttgaaatgaacagcttgactcaaagagtgtggcttttacggaacaaggagctcattttgctttcctgaatcattggaggatgttcgcctagatcctgcctagaaaacagcttttctctcttgaattttatcgtatcagcccacggaggagttgggttttaggctgtgaatattgctgtatgttattctcataatcgggacttaagttaacataaactacaagttttcttgccatccttttttttttttagagatggagtcttaatctgtcacccaggctggagtgcaatggcacgatctcagctcactgcaacctctgcctcctgggttcaagtgattctcctgcctcagcctcccaagtagctggggctacaggtgcacaccaccacactggctaatttttttgtatttttagtagagatatggtttcgccctgttggccaggctggtctcgaactcctgacctcacatcatccacctgcctcggcctcccaaagtgctgggattacaggcaggagccaccacacccggccctcttgccatcctttagttcagtcagatggcgtggtggctcacgtgccaatcaattccattgctttgggaggctggggtgggaggatcacttgaggccaggagtttgagaccagcctgggcaatatagtgatatcctgcctacacacacacacacacacacacacacacacaaatgtgggcacagtgacctgtgcctgtagtcgtagctactggggaggccaaggtgggaggattgcttgagccaggagttagaggcagcagtgagctatgatcacaccactgtaccccagcctggactatgaagcgagacccctgtctcaaaaataaaaattaaatctgacagcaaagaccttggatgataagaagacagcccctgtaagccaaagggaagttcaagtttggttatatggtgagtggagattayaagcatggacctgtgaatcagacagctctgggtttgaatccccccaccatgtgaccttggccgaatgacttagcctcttgataaggtggagataatcatcatacatatctccccaggaagttaagggactcaaataagatggtgaacatgaagccctcactgattggtgggtgttacacctggtaagtgatattttccgagtggttgtgaaggggccctaaaggaagggmatgcttctgaaccgggaggtgaagtcccttcttcgcagctctgatcatggttggggccagttttcactgcctctcctggttatcagtttggtgtggaggaaacccacatctgtgtcactctagttgctggtgatctggttgacgatgacttggtggtgtgtatcctgtgaaccgttgtgattcataaaggaaaaaagaagggtgtaaggcctcttacttgactacaaggtgctgtattattctttttttcactcccttatcccatctctttattctattattaagccactttcattgttgttgttgttgtttgagacagggtctcactctgttgcccaggctggagtgcagtagtacagtcttggctcactgcagccttgacttcctgggctcaagcgattcttccacctcagcttcccaagtagctgggactacaggcgtgcaccaccatgcctggataattttttttttttttttttgtagagacagggttttgccatgttgcccaggctggcttaagccactttcaaaaacccagttgtcaaaacaaaaatcttttatcggaaggcacatgtgacctttactacgtacgtattgttttcctagcatgcgccacgctacctaactcccgtctgttcagaaagtcctgttccacatacctttgtacctcaaacctggagagaattggcaggattgagaggcagctctgggatgtttttttgtgaggtttttgattttagtgaaggttaaagtgaaaagctcactaatcaattgctttgtgtccagctactccctatagagatatttctcttttgtatgtggtaaggaatactcgaaagacctttgtttggtttgtaatttcaagcctgtatgttataatttggggggaacaatgcagaatcatgttggcagaaaggagagaaaatggccgcctgtgtccccagtgagctgtttgttttctttccgctgagcgaatgcctggaaggccggcctcactcctgtgtcagtcacaggcaattagggctaatggctcaacatgtctttatgtagggcgtgtgtgagggttactgttctcggggattgggcacttcctgtttccaggcagctggaaaactccaggctctgaaaacgctctttattctaagtctggcagatcgagcagcccagggaagccgattcccctccctcatcctgccagaggctgaaacacgtttctgaggtagagcctaaacagcatcttttccttggggcatttagaacgtgatgagggccacatgtgggcctggggaggctgctccccacttgaacatgtacgatggtccagagaagggtgtcggagacccaattttccaacccagatggcttccacgtgctcttctctaagatggctaggagggctctgtgggctgactcggggcctggagatcgtcagccacctacctggagactgactagcactgctgagtgtctaagagggagcatggcaggcttttggttggctgatggaagccagagagagtactatttctgccagcgatccttccagttcataggcctgccagccccaccccagtttacttaaaagtttaggagatccaggcaaggcgggttattaatttacccctggtgttccagagtcaggggaccaatgagagaaggaaatctgtcatttctaattccaataccaacaaagggtgtgttgtggcaaagggattggagtgctatctcttaggaactgcatcttcttgagtttgcagaatgcctttatcttttatgaggatatataaatgcagcagctgaattgagtatctactagtgcccaagttctatattcgaggttttacactgttgattctttcattagacagaatatctgttactatttaagagacagcaggtcaggtactgggtatggcagatgcagtgctaaacaagaaatggttcttgctaccagactgtttcatgatgcgtgccctggtcactcagttctccccctggctcgactcagccattcccttggctgcctctgggatctgatgctaagtccatatctgcctcttgagcccagttctctcctgactcactacctggacagttccatgtagctatctcaacccaacagaacttatcatcttacccatcccatccgggctagaacctggtccccctcctgggaatggtgccaccatttgcccaggtgaccttcaagtcatacatctttcccctgaccctgacatccgttcagtcatcaagccctgcctctgggcctccagactgtgctgtctcagcttcccatactgatcctgctttgcatttatcacaggtgtaatttgcatacgatttattaagtgaccatctcctccaccatactctaggtgccatacgggcagggattgtgtctttcttatttgcctctgaatgcccagcacctagcacatatgcacctagcctggcacatagtgggactccaggaaatagttaaatgaaacaatgattctctcttttttttaatttaaaattttattttatgatttttcttttaattatactttaagttctggggtatatatttgcagaatgtgcagtttcgttacataggtatacacgtgccatggtggtttgctgtacccatcaacctgtcatctacattaggtatttctcctaatgctatccctcccctagccccccacccacccctgacaggccccggtgtgtggtgttcccctccctgtgtccatatgttctcattgaaacaatgattctcttaaacaactctcaaatctgcccacttggctacatgcttttgcaatattccagaccaaattaccatgatctgtcactcgagtgactgttcttaccctttcccaatctattttaacttttctttttttgagacattgtcttactctgtcacccaagctggagtgcagttgtgcaatcttggctcactgcagcctcagcctcacgggctcaagtgatcctcccacctcagcctcctgagtagctgggactacaggtgcctgccaccacacccagctaattttgtttattttcacagagacaaggtctccctatgtttccaaggctggtctcaaactcctaggctcaagcaatcctcctgccttggccttccaaagtgctgggattacaggcatgagccactgcgcccggccctgttttaacttttaaaaataaaactctgagcatgacctttcaccatttagaatgctccagtggcttcatattgtctttggggataaattcccaaatccttaataaggcctaaaaaggcctgtgtaatatgaccccacctacccttcaagccttcggtgggatccactccacatctctgcctaagccacgataacttaactttaatttgacaaatgcatcaccctctctccggacttaggatcctcccccatgctggtcactctttctgaaaccttccttgccatcttgtccattaattcctatacatcttcaagtgtcaacttaatcagtaaatcctctgggactccctcccggatccctggtggacaagaagaagtgtgtccttcctctgtcactcttctcacacctgtcattgcttgttttctgcctctctgctattcttggctctgcacaccaaggtggccgggagcctggcacagagtaggctcccaagacatgtttgcaatgaatggatgagtgcttttaaatgccatctttttttttctttccttcacctagatgaatgttttttgcctctttgatgcctcaaagaaagaacagctatgacagcaatattgcattttcttcccaagggcaagaaagttgagcctaatgctgtcattcactggcttgactggctttgggttcaaatatgcatctctcatagttcagaatgctgttttttttgtttgtttgtttttgtttttgtttttgtttttttgagatggaatgtcactctgctggtccaggctccgtctcccaggttcaaacaattctcctgcctcagcctcccaagtagctgggagtacaggcttgcgccaccacgcccagctaattttttgtattttttagtagagccagggtttcaccatgttggccaggctgtgctcgaacgcctgacctcaagtgatccacctgcctcggcctcccaaaatgctgggattacaggagtgagccactgcacccagccctcagaatgctcttctctgttcataaaggatcgctcttcctgcactggcagatactgtgcagcacggctcctcttcactgaggcatttgagctaagcttgattgctttctgggccctccaggggactctgtctttctaactttatcttctcaactcatccagtctccctcactgagtgacaggagcaaggttctcttggggatctcatggctgtatttttcaggttgctgcattttttttttttttaactgagatggagtctcgctctgtcacccaggctggagtgcagtggcaagatcatggctcatggcagcctcaaattccaaggctcaagtaatactcctgcctcggcctcccgagtagctgggactacaggcgcatgccactatacccaggctatttttttttttttttttggtagagatgagggtctcactctgttgcccatgcggatctcaaactcctgggctcaagcgatcttcccgccttggcctcccaaagtgctgggattccaggcatgagccaccgcacctggctgcattgtctttttgaaatatgcagcagatgagactttggccatatgtggttacacacgtctgcacgttttaagaactgaaggctgctgaaacctgggctgaagatgtccaaatacagcactccccatcccttttctctgtccccatctgtaaaccctcctgctttccatagcttttaaattaactagcgtgaaagaagccaactggaagggtatgaagttttcaggttgcaaatgtctgtgaaagaaggggtgccaggaaggtttgaaggggctagtgagatagtggttcaggccgtgggcaatgggaagcgaggctgctttggtctgcaggccctgtatctgttttttctcagcrctcagcccactttggggacccagtgctcattatcaatgagccaactgtgtgtacatggcttagataaactccaagtgtgtcccttacagtctttgcagctccctcggtcccacacacacagaggcacattattttgccctggcagccagcacgccactgtggtttcttacataacggagggcgttgtgtttggactgccgacttacytcagctctgccatttcacaccatgctttttctcccgcagccattggctgccccgtctgtttcctgcctccgagtggaattaattgaggagggatgttttctggatctttcggatttgccatctcctctacccccctgcccaattatggatatccagaggcactctcttgagatggcccttaagacactatcaaggacgacagccttgtaagagttcttggatgtttgtttgtggggacactctaagagatgttggaatttggagcttctctgctaagttataaaccaggcrctgccattgaatttcattccaaactcaacttcagcactagccaaagagtcttacccaaggagttttaacactgagctgctcaaaactatttgtgagaaaacagtcctttttggttgttgttttgttttaatttattttaaaatagtctgtctattgtgaatcctttaattctatactctgttcaatgagacgaatctattgagcacacatgtggatattacagcaatgtcagatcggtacaaaagttcctaaagtgggccaggctcatgcctgtaatctagcactttgggaggccgagtcaggaggattggttgagtccaggagttcgagaccagcctgggcaacatagcaagacttcgtctctacaaaaaatacaaacaaaaacatcagctgtgtgcacctgtgatcctagctattctggaggctgaggcaggaggatcgcataagtcccggaagtcgagcctgtagtgagctgtgttcaagtcactgcccttcagcctggatgactgagtgagaccctgtctcagttaaaagaaaaaaaagtttctaagtgcttagaaacttcagtacttttctggtcacagaacagtaacagtttgggctgtggaccattctttgagtagcatcagattaaaggattacactgagcgtctgtgtctttcctccagtttgtttctttgcttagtatggttagtttgtgactctgcagggattgttacatgcttaggtcacatggaatagtgtgtgtttctggcttcctcatcaccatctcagaacttaaactcttatttccaaagattctactgttgtcggaggctgggccatgagatgttttcaccttatgtgtatgtattcatgcataattattcattttcatttctactgcactttctttcctttttttggagacagggtctcattttgtcacccaggctggagtatagtggcgtgatcatagctcactgcagcctcaacttccttagctcaagcagttctcctgcctcagcctcccaagtagctgggactaccatgcgccaccatgctcagctaatttttgtactttttgtagagacaaggtcttgctatgttacccaggctggtcttgaactcttggaggctcaagcgatcctcctatcttggcctaccaaagtgctggggttacaggtgtgaaccaccgtgcccatccttactgcaatttcttgagagctcctcaagagtaaagaatattgtgtccgtctttgtgttccctgtacccagcatacaacttggcttccaaagagagggagtgatgtgttacatgagtgggaaaatgatatcacattctcagtggcccttaaaattttttaaagtttttttctgatcttattataaaagcccattgatggaaaattagaaaaaaataggaggtgggagaagaacagtacataataacaacagttaacaaacacccccccagagctgaccattggtatttcttctgcagcttgtgtgtattttttttttttttttaaacactaactacagctaccatgtattctaagtgtttctaaggtgctggggactgcccagtttcctacctggatgatttcatgcagtcttccctctgtgagagagctacttttatcctcatcttgcaagtgaggagaacttaagcaatttgcctggcaccacatatacagatacacgtataacacacatctaccaaaagttgataatcttccagtatatgcttttaaaatccattcgtttttattgtaaaatattgtaagcatgcagatacaaatggagaagaatgtaaaaaatacctgtggctcatcatctttggctctgtgctgcatttgctacaggtctctccccgtctttttttttttgtttgtgtgttttgtttttgagacagaatctgtgtcacccaggctggagtgcagtggcgtggtctcagctcactgcagccttgacctcccaggctcaggtgatcctctcgcttcagcctctcgagtacctgagaccacaggcacatcctaccatgccaggctaatttttatattttttgtagagatggggttttgccgtgttgctcaggctggtcttgaactcctgggctcaagcaatctgctcccctaaacttcccaaagtgctggggttacaggtgtgagtcactgtgcccggcacctgaggaggtctttttttaaccacctctttttaaccccttgatgtataagatgttaccagtacagctgaagcttccatgaactctctgatctcattccctgtatacagtgatacatggaacttgggacatgcatttaaactgctatacggtrttctgttacatgaacagataaaaatttatccatttacttgtttcttgacagctagaaagaatggctgcagtaggccaggcgcagtggctcacgcctgtaatcccagcactttgggaggccgagctgggtggatcacaaggtcaggagttcgagaccagcctggccaatgtggtgaaaccccatctctactaaaaatacaaaaattagccgggtgtggtggcgcatgcctgtagtcccagctactcaggaggctgaggcagaagaatggtttgaaccagggaggcggaggttacagtgagccgagatcgtaccactgcactctagcctgggcgacagagtgagactccatctcaaaacaacaaaacaaaacaaaacaaaacaaaaaaaacacaatgaaacaatggctgcagtaaagttttcctgtgcatgcctttttgtgtatgtggttttttctttttcttttctttctttcttttttttttttttttgagacagagtcttgctctgttgcccaggctggagtgtgcagtggcacaatctcggctcactgcaacctccgcctcctgagttcaagtgattctcctgcctcagcctcccaagtagctgggattacaggcatctaccaccatgcttggctagtttttgtttttttagtagagacagggtttcgccatgttagccagggtggtctcaaattcccaacctcaggtgatctgcccacctcggcctcccaaagtgctgggattacaggtgtgagccaccactcccagccagttatttcttaaagatttgtacagcaactggaatttctgcattataggaaatgaagatcttcaacttcagtaggtattatcaaattgcctgagtcacctaaccaattcatactcctgtgagcatgcataagcattcctgctaaaacttagtgttgtcaggttcgtttcatgtgggccagtctaatgggcatgaatggtacatctttgaggattcagtttgaagttccctgattactattgagattgaacctctttttacatgtctttattaggttctttggtttcttcttttataaattgcctatttatttttgtccattttttatttgtctttatatatatttatttttaatctgcaggattcttttttgttgttgtttttgtttgtttttgagacggagtttcactcttgttgcccatgctggagtgcaatggcgcaatcttggctcactgcaacctctgcctcccaggttcaagcagttctcttgcctcagcctctggagtagctgggattacaggcatgtgccaccactcccagatactttttctgtatttagtagagacgggaattcaccatgttggtcaggctggtcttgaactcctgacctcaggtgatccacctgcctcggcctcccaaagtgctgggattacaggcatgagccaccacacccagccaatctgcaggattcttaataatgctaggtacaaattgcttctcaattatacgcattgcaaatatttgctcccagtctgtggcttgtcttttcaatttgcttatggtgccttttattgtacaagagttaataattttaaatagccaaatctgtaatctttttcatgtgtcttttgtgttttgtctaaaattcttccctactcctaagttacataaaaatgttacaggccacacttggtggttcttgcctgtaactttagcactttgggaggcttaggcaggcagattgcttgagcccaggagttcaagaccagcctggacagcatagtgagatacccatctcagcaacaacaacaacaacacaaattttatacacattccacattttatttattctgatatgcatgttatttcacattttaacttgtttaaaaaatcaagatgtgggccgggtgcaatggctcatgcctataatcccagcacttcgcgaggccgaggcaggtggatcacctgaggtcaggagttcaagaccagcctagccaagatggtgaaaccctgtctctactaaaaatacaaaaattagccaggtgtattggtgcatgcctgtaatctcagctactcgggaggctgaggcagggaattgcttgaacccgggaggcggaggttgcagagccaagattgtaccactgcactccagcctgggtgacagagtgagactccgtctcaaaaaaaaaaaaaaaaaaaaaaaaatcaagttgtggtttataggcactggggtggcataatttaattggcagtgttttttttcttagtgttatgtttaataatcttacaatcgatggcattttagatttgatgaaaaacaatatataatttctaaacaaaattttgattgtcttagtcatattactttaaacttgccttttctacccaatatattgtaaatacctgaacaagtcaatatttatctacaatgttatttttaaggaatgaatacccattataggaataacatgatttatttgattaactctccatttgggggtgtttaggttgcttccagtttttctgtaactgctgtaatatgacgtaacagatgcacttatagctaaatttttgacacctaattatttctttgggatatgtcctagaagtaaagtagctgagttaagggccattcacaagaaaaataattaaacggtattcacataataaaggttttttggccaaattgccctttggaaagagtgtacccatttttgctcccattgatcgttcttgatagtaactgtccctatactgccaaccttttatctgcaaaaatgttaaaaagaattttttagaggctgggtgcagtggctcacgcctgtaatcccagcacttttgggaggccgaagcaggaagattgcttgagcccaggagttcaaaaccaccctgggtaatatggcgagactctgtctctatttttaaaaaagataattaaaagaattttttatagatgcatatattttaatgttgccaacttttttttttttctttgagacagagtcttgctctgtcacccaggctggagtgcagtggtgcgatctcagatcactgcatcctccgcctcctggactcaagcgattctcctgcctcagcctcctgagtagctgggactacaggtgcgtgccaccatgtctgcctaattttttgtatttttagtagagacggggtttcaccatgttggccagggtggtctcgaactcttgacctcaggtgatctgcycgccttggcctcccaaagtgctggaattacaggcgtgagtcaccgtgcctggctagtgttgccaacctctattgaggagctttggtaaagataaaaaagataagaagaaagacttaattcaggagctttggtagctgctcccatgccatcctgtgtttggaggcataaagtgctggttgttgagttattaaaaggttagtgtgcttagatttaaaggctagttccttatttcaggaagggtccttcggggaaggactgagtttaacacatttcctacccagtttacaaaggacctactgaagcactaaacacagtgcacaggaattatattccactgcagacagattgctgactcataaaacagcctgaaaacatccctacagaagaaataaatcttatggttctccccggaagtggccaaagcttggaggaagaataggacttggctcagaaacatttattataggagcatagaatacaaaaatgtgattttatgtagcttttgcctgtggggcattgaacttctgaagaggcagctttaagaatacttgagtacttccagtgtattcttcttaagtttaatttttgtctaagtaaccagcaagacatcttttctttaggatgtgaaagggttcaggtgtggtcttatttccttttctctgagatggagtcttgctctgtcgcccagtctggggtgcagtggcgcgatctcagctcattgcaagctctgcctcccgggttcatgccattctcctgcttcagcctcccgagtagctgggactacaggcatgtaccaccacgcccagctaatttttttgtattttgagtagagacggggtttcacatggtcttattttctaatggagagagtggattttgattgagttagctttactaataatgcccagtgcttgtgtcagtgaaaagtaagcaaattaatgaataatacaagctgataatgctcttaccaagactgaaattttgaccattttggtgtatcaatttataagggccacttgaaaagaattgctgttagccaggcgtggtggcgagtccctgtaatcccagctactcgggaggctgaggcaggagcatcacttgaactcgggagatggaggttacagtgagttgagattgcaccactgcactccagcctgggtgacagaacgagacttcgtctctaaataaataaatatataaatagagaatttatctaaaattcactcgaactctttgcccagctttaatcccttttagcttaatcctattcttggtgaaatgttgatttggttcaaacaggtgaatctgaccaagaaatatggtgatcagaatggttgaacacacactgtaacaacgggtaattgagcattaatttcctgaagacctttgggaaacctttgacaagaaaacatggttcaggagaccagatgatttcctgtctgataacatgagagagatgctgatgtcattctaataatgagatggagatgtttagcctttaacctgtgaagatggcaattgtgagtggattgggacgtagggttggaacatggttcatatacaactgaaccaagggcagctacaatccatcagtgcaaaggtaatttagggaaaggaaaaagtacctaagattaattgcagtcagacggagactgcttttaaagtactttgaagtacaaagacctcgtgtagtccatgatccaaccaaatgttactcattgaaggccaaggagcaatgtgttgggtagggactgaaaacaagcttggtgctttgaacactgttcctgagagcatcaacggaagctatcgagggggacaggagatgacccatgtgaccaagatgcagtgttgagacccgtgggtagtttgattgaaaagccttttaatctcagtgtgaaggagttgcttataagtgacagaaatataacctctgacagggatgcgctgatgaaaaattgataccagtgtcactttcttggcatgggggggaccaaaccaagacagtcggaggctccatctatgtgagtcagcggccactgaggaggaacaggaatcaggaggctcgtctggttggtgatagaatccaccgactgtgctgcctgaatgaaggggagagatttgtgtgaattatgaatagccatgcaggtgagggaggagtgaggttctgtgagaaagggaggcaggccaggtcatggatcagggaggacccgcagggacatttaatctgagcaggggtccaactgcaaaaggaaaaaatgatatcaaaaaaggtgatggaagaaaggtcttgttcctctggcaactattcttctcgctaagccagttgagggggttcatagaaggacattgagctttgcgggacaataatagtccctgaaagagagactttcatttccagcatcagccgtgatcaaagatggaagggtgggccttatctgggcctgtgtcctctgaagacctgctgaaactgttgaatataagggaagaggactcagcactgatttcatttctggcagtgtgtgggaataccactgtgtcaattacagacatttatttcatggaatttgaagcattagcctaccttcatattaaaacgttagccaaagtgtaataaaatcagtgtttctctccttgtctcaaatgaacataaaagatgtcaaaagtggagactgctgataagatgaaagttgaaagaatttttggaataaaagaaaaatggccgggcgcagtggctcacacctgcaatcccagcactttgggaggccgaggagggtggatcacaaggtcagaagatcgagaccatcctggccaacatggtgaaaccccatctctactaaaatacaaaaaaattagccaggtgtggtggcgcatacctgtagtcccagctactcaggaggctgaggcaggggaatcggttgaacccaggaggtggaggttgcagtgagccgagattgcgccactgccctccagcctggcgacagagcaagaatctgtctcaaaaaaaaaaaaaaagaaagaaagaaaaatgtgtttaagttttgtttttaagctccaattgctacaacagatattttgtctttataaaaggggcagcccacccaaatattagagttttccaaatagtgactgaaaaatgagcgtactagtattagggcttttgtgccacaaaactacccaaagaactgttttcaaggaagggaaggatgcagctaaattcttcgggagtgctggagagttctcagctacttaaattgcattaggagcagatgttataaaagagaggcttgctgccattggcgctcagcgctttcattttttaatacttatccttaagccaaatatctttctcaggactttcttcatttccaaattcagatgaataaagagggtatcagatttgctcctctgttaccgagcagacagaaggtatttggagaattgctgtgaagctacagtatgtcggctgtcttctgtgctagaaggccctgccaaatccccacagacgaaacaccagcctcttgagctggcaatattgttacccctttgcttttaaatcagaagggcattcagagggagaagatctttaactatacccagtgcgcattttctttttttttttttttgagttggggtctattgcctaggctggagtgcagaggtgtgatcacggctcactgcagcctccaactcctgggctcaagtgatcctcctgcctcagtctcctgagtaggtacgattacaggtatgtgccagcacatctgactatttaaaaaaatttttttatagagatgggatcttgctatgttgcccaagctggcctcaaactcctggtttcaagtgatcctcctgccttagcctcccaaagttctggtactgtaggcatgagccactgtacctggccctagtgtgcattttcatctggccacttttgccagatcctgcccttttggtaaaatactaaatgaaatatgaagatctcccttttgcagtgggaggaaccagggcatctgggtcaaatccccaggagtctcatcagtcagagccttgagcaagaatgcccgggagagaaaacatccctacatgctatttaatggtgtttgtcatgttaaataagtaagcaagaggccgttagcctgaagctgtctccatacttccagttcttacatagcaaactacaacctaacttagtacgtaaaccaaccaaaacccaaattaggagtatatgttttttgtaacaaatagctgggttccagccagtcacaggcaggcagctgatcagaccacgcccaaataaggcagaygcccagctgtagctgtttagatgatttctctaccttgcttccgtgttcagcctctaaagacttgccgctcacactgcttggcagcgctctctgagcctctcctggttctgagtgctgcccagttcctggatcattcttaaataaacttggttaaatttattttgtctaatgtttgtctttaaacagtagcactctggtcctcaaccaagagttgtccgctttggggggtgtgtagaacctccagatctcactgttcttggggccagccctcctagtggtgcaaaatgtgtaccttcttccaggagatcagatctgagcagaagattgtgattaaaatggagcctagaaatgtctgtggacccattacaggttgagtgttcctgttctgaaatgcccccaaatccagaactttttgagttccgacatgatgcttaaaggaaatactggagaatttaggatttcaggttttcagattagggatgttcagctggtatgtattctgcagatattccaaaatctgaaaacaaaaaatccaaaatctgaaacacttctggtcccaagcatctagagaaggggctactcaacctgtataattcctccctagtcatcttgatcctacctcaatgccagtgctagggaaggctgctcactttgagatcaggattgggaagccacctggcacatggccatgtagtagagtccttataaatttcagttcatcttccttttctkcccattcttcctttcagcaaagcatggtgaaactcatgggcttggggggcagagctgagtttgaatcccattgaagagttacatagtttctctgagcctcagtttcctcagtggtgatggtgattccaccttaaaggatgaaggcaaggattgcatacatggtgttagcctgtagctcgtggtagattctcagtgggtaatggtgtctcctctgcttctttcttaccttgaaaaccttatgtatctgtttctttttctttccttttcttttctttcttttttttttttgagacggagtcttgctctgtcgcccagactggagtgcagtggtgcgatcttagctcactgcaagctccgccttccgggttcacgccattctcctccctcagcctcccaagtagctgggactacaggtgcctgccaccatgcccagctatttttttatatttttagtagagacagggttttactgtgttagccaggatgatcttgatctcctgaccttgtgatctgcccgccttggcctcccacagtgctgggattacaggtgtcagccaccgcacccggccttacgtatctgtttctggactagcttctgaggggctgatcaatgcagtccactaaccagacatcccagtttaaataagaagtggcagtgagtacaggtaatatctatcagtgtagatacatcaggcttaatagtagaagttaggacttttttcttcatatacagttagctctgctataacatatgtgctcctaaaagtcagcacgtgatgcaaaattatgcagttaaaaaccatagagggtaggcacgttggtttgtgataccagcactttgagaggctgaagtgggaggattatttgagcccaagagttcgagaccagcctgggcaaagcaagaccctgtctctacgaaataaaaagattagctgggcctcgtggcatgcacttgttttcctagctacttgggaggctgaggcaggggtatcacttgaacccaagaatcagaggctgtagtgagctatgatcacaccaccacactccagctcgggcaacagagcaagactctgtctttaaaaaaataaaaagaaaaatatgttaaaaggataaaaaccacagggcttgtggggaaaagtgagtaggaatgtaatactaaaaatatttgtcaatgacacattaaaaaggaacctaataatgatagcagttttacacatgttaaatgattacgaaatagataacactacagtaaatatggcattttctcttgagaagacctgaagtttgcttgtggaagcaggtgtcagaagttggagcttgtgagtattactgtgaactggtgcatggagggctatctgaaatcagatgggagttgtaactccagatgttgacggtgtagcctattaatacattgtaaactgaggaggttgctagatgcctgtgggttttgtgcattcttgtgtaactaggtttagctgggggaagtcttctgtgttcatctagtgtttctcacagacaaaatcacgcataagcaaatagaattcccattatgctcacatcgtccgcttctatatcaatagcattggaacaaatttgcattttcaaagcaagcattaccgcagaactgactgtagtagcttcccagaaaaggtcaacttctcctagacagtacccaaaagtagaagtaaataaattcagtgtaaaacataaaggcccacagcaccattaatatccttgagaaagtggtaagcattatataaatacatttttgcatcctttatatataggttactatattctgggtaagtagagttattgtcagactgcatgcaaataacaggagtgtggggataagtggtccttggctgtattttgtactgatcgggcttgtgtattatctctgaatcacctgctaccttggcattctttcagtagtgcacataagccatcctcagcaccttgatcttatattagcttacaaacagatttgacttcataggtagagcagtataaaataaccatatgttgtgtttctgtattcacccagatctcgtttaagatactctgtaaatgaatcttatattacaaaaataaatgtgagcatgaatatatatgatgctcggaggagaggggtagtcatagaacctgtgactttaagccgggtgcggtggctcactcctgtaatcccagcactttggcaggccaaggtgggtgggtcgcttgagctcaggggttccagaccagcctgggcaacatggtgaaacccgtctctaccaaaaattaaaaaacaaaaatagctgggcatcgtaatgtgtgcctgtagtcccagctactcgggaggttgaggtgggaggattgcttgagcctgggaggtggaggctgcagtgagctgagattgtgtcactgcacttcagcctgggcaacagagtgagaccctgtttcattaaaaaataaataatagtaaagaatctgtgactttaacaggttgggtagacgaaaaagcctggagggcctatagatgatcttgtggaggggtctatgaaacccagaaattgcaatacaaatttttgtcctaagtgcattttgaagggaaagggtcctcagctttcatcatgttcctaaagggacctttgtgaaatggtggagaaatgctgaatttttttaaaaaatccatggaatatatattcctgtcagtcatttagggaaatttagagtgatctatagtggatcctggtccattgattccatacaggggagctattatagtttcttcaagaagcactcctggctggcaccctcagccacagcaggaactggcttcgccattgggtcggcctcgcatgtcatctttgatgcttcctgtaaattagccacatgagtgatgaaggtcttcctttctaacagggcctatgcctttccactgtgtgtctcatgctacccttgactttatttttcagatgggaacagcgagagctgcccaacggacgtgtctattatgttgaccacaataccaagaccaccacctgggagcggccccttcctccagggtaggtcatcaactgagaagacctgagactctggaactgacaccatgagtcacccaatggcttcttgaaacggtccctttctgcggaggtagcatagcacagtgacgtttattccgggtcacttgattgcttttcctatccacttaccttaatattgctcccatgtcttaggacatattagaattattagaagatctctgggaaacaaaagrcgcatgggaggccaagatttagagtgttgatgcattccgccgtaccctatgyccagcctgtccctaaaggcagagtgcttcttattcggcagggcttcgtgagaatgccgccaagttatccaaaaccaaaggatgagagaggcttccaagagagggaagactgtccaagttcaaggagaaggggtttggttccctgtctgccagggacagaaagttctttccacatgtgtctcctggtcccgagagctttcaaaaggggatgtattctgctccaagaaagaatcacctcccagtaaagtagccatgaagggctcctgtataaaatatgcacacttcccctgccctgagtttgtggagggaaaggctgtcggaagtagggactcttaggagagcccgtgtgccctgtttggttcagctgtcaggcgtgtgccacacacatcccacctcatcttctggtcccataattctccatggatgggctgcttttagctccagttttccagtagaatgcttgagttttccttttttccgtacctcctggaggatgaaactcataacctgtcatcatcagtactcactgtgttttccactttgacttgaagtcaaatgaagttaccaaagttaaacatggacttctcaaattagaaaaaaacaaacaacaaaaaaacaggttaagtgttttgttatgaaaattatgaaaatgttcttattattatggaaaatttcaaatagatatagagagaataatgttacaaacccccacatactcaacatttagcttcaaaaattatcaactcatggcgggttttgtttcatctgtacaaactagtcggcacactatgatggcctgtggacaaaatccggccctctgactgtttttgtaaataaggttttattggaacacagccacacatatttgttgacttattgtttttggctgtttttgtacttcattggcagagttgagtaattgcagcagactctatggcttgcaaaacctaaaataattactttgtgtagcgctttatagaaaaaatttgctaactcccgatctgtaacccccaacctatccgccgcaccctgatctaggtaattttgaagcaaatcccaaatgtcacatcatctatccatatttcactatgtatttctaaaacatattcttttattcaaaataaaactctaatatcattaacagtattttgtttatattatcaaatacccagtcaatatttgactttctataattgtgtcacaaattaaacattgactttaacagtatgtattacacacttgtactttgtgtactttataacatgtgcactttaaaacagcaggagctctgtgtactgtggcttttttttttttagacggagtctcgctctgttgcccaggctggagtgcagtggtgcaatctccagctcactgcaacctccacctcctgggttcaagcgattctcctgtctcagcctcctaagtagctgggattacaggcgcccgccactatgcccaactaattttttgtatttttagtagagacagggtttcaccattttggccaggctggtcttgaactcttgaccttgtgattcgcctgcctttgcctcccaaagtgctgggattacagatgtgagccactgcgcccagcctactgtggcttcttcttaacctctcttgtctaggagggacgtaggccttgacccagtgagcatttgcatggaatttaagtaaagatattcagtggtaccttctaaggatcgctggggacttgctctcctctaggtgttgaggtgggacactactaatcaagctgtcttatttcagggtagttttcatgttttcctgggagatggctcacctgtacgccctgcatagcttactagtccttcctgagttttaggtcaagaactttgagcctctagctctcatttctgctctgtaatcacaggggatccagagagaacagaatgaatgcttaagctttcatttctcattaatggcagaagtcctgcctccagggaagtattaaccatggtgaaaacaattttgaaactacagatggagccatgatctcaacagacctagtccctggggagcaagattgaaccaccgattcacttaatcatggcygtccctgcataggaaacccacaggaaacttgtatgagaatgggtccttytatccgggagcaataagtattggacctagtagctcagggtgaatgcatccatttgctcatcagtcactcttaagcagtgttcagaccacaggtaagcaaagagtgatcactgtgaaacargaggattgaggaggcctcacagagggaagtggctccaactcttgcaagaagatgatccaggttggggggacagtggaggtggctgcctgcatatgggaagggaaaggatgtgtttggggaaggatgcatggggtggttatgctggagtggaagggttgtatgaagtaaagaagtccaagtgtgcccggtggggctctcaggtttgggggagatgcccaccagagccaaagagggtggaagggctgactgggcctccagtcactgttctgtrcaagatttcaactgaaataaagagtgcaatcgtgcttcttagaagtggaaattcaccacagcagagtacttttagttaaacatgtggcttgaacatgtgtttatttctattcttcctgaaaacccactaaaatagtaataaaagtattaaaaaggcataaaccttcaacaataaagggatggaagaggagaaacagcatatgggagatgttaatcaaagtttagtttctgatagataaatggcagagccgagagaatgaaacccacacctgcaggatgaggaatccaccaggaagccggctgatgtgcaccatggggctctggaaagcctcagcgattagaggcaccaaggatgggtgtggaatgagattaaaaccttggctgggctcggttgctcacgcctgtaatcccagcactttgggaggccgaggcaggtggatcatgaagtcaggagattgagaccatcctggctaacacggtgaaaccccatctgtactaaaaatacaaaaaattagccaggcatggtggcacacacctgtagtcccagctgcttgggaggctgaggcaggagaattgtttgaaccccagcggcggaggttacagtgagctgagattgcaccactgcaccactctagcctggacgacagagcgagactccatctcaaaaaaaaamaaaacaaaacctcattggttttagatcagttggaagatgagttggaagtttgtgcagggagttagattcacacacacacacacacacacacacacacacacacagcctcatgactgcctctgacattgagaagctgcagagagagtaggaggaccaggtcgggggacacaaactatagctgaaggccaggatgaactcagaaacaagagattaaatgcggatgctatctccattccccaggctgaaaattggagggtagttttgtttgtttgtttgtttgtttttgctggggaaagtgatagtctaagagaaagaaacatagattgtgatatttgggaaccttctagtgaaatagctgagactcttcctggtcactctacagtctgcagccctcatctgaggatacagaactcagtcagtgttttagtggctcactgttaaatgcgaatgaacacagctgggcacggtggctcacacctgtaatagtagaacttccagaggccaaggcaggaggatctggaagtagaacttccagaggccaaggtgggaggatcgcttgagtccaggagttcgagactagcctgggcaacatatggagaaccagtctctacaaaacaaaaaaaaaaaaaaaaaaaaaaaaaaaaaaaatatatatatatatatatatatatatatatatatatatattttttttttttttttttttttttttttttttttttttttttttttttttgagacagaatttttgctctcgttgcccaggctggagtgcagtggcgcaatctcggctcactgcaacctccacctcccaggttcaagcgattctcctgcctcagcctcctaagtagttggggttacaggcacatgccaccacgcccagctaattcttgtaattttttttttaaagtagagatggggtttcaccatgttggccaggctggtctcgaactcctgacatcaggtgagccacccacctcggcctcccaaagtggtgggattacaggcgtgagccaccacgcccagccaaaaaaaagttttttttaaattagctgagtgtggtggtgtatgcctgtgttcccagctacttgggaggctgaggtgggagaatcagttgggcctggaaggttgaggctgcagtgagccgtgattgtgccactgcgctccagcctgggtgacagagcaagaccctgtctcaaaaaattataataataaataaaaataaatgtgaacaaacagccaaagatgagcagacagaaaaaagagacttggtgaaaacaatataggaagctgaaaaacagctttggaaaggaaaaccagattataattgatatcctcaaagatttgggagaaaataatggcatctgtgcaacaagaacaggaggccatgaaatggaccaggcagaaaacaggagcttttagaaattaatatatatgacaacagaaatgaaaaattcagtagaatggttgaaaggtaaatttgggctgagcatggtggctcacgcatgtaatcccagcactttgggagggcgaggcaggtggatcacctgagatcagaagttcgagaccagcctggccaacatggtgaaacccccgtctctactaaaaatataaaaaattagccaggcrtggtggtgcttgcctataatcccagctactcgcgaggctgaggaaggagaatcgcttgaacctgggaggcagaggttgcagtgaactgagatcacaccattgcactccagcctgggcgacagagcgagactctgtctcaaaaaaaaaaaaaaaaaaaaaaaaaaaaagaaagtgataaatttggagataagaagatgagaagatgtgaccaagacattcaatatctgaagaatagttctttagcaagaacttgcggaatagcaggaaagaacagagaaacaggcaataggaaatcattagaaaagaaaattgccagaactcaagtatccagattcaaacagctcaccacaygcctagcccagaggataaaaaaagactcaccccaaggctcatctgattgaatttctgagtgccaagagacagcctcagaaacttccagagggaaaaaacagagtacctagaaaggatcaggaaccaagagtgccatccttcttctcagcagctgtagagcaggaccttcacaattccgatggaaaatgatttcctgccgggcacagtggctcaaacgtctaatcccagcactttggggggccaaggcaggaggatcgtttgagtccaggagttcaagaccagcctgggcaacacagtgagacactatctcttmgaaaaacaaaaaattggccccgcatggtggtgcgtgcctgtagtcctagctacttgggaggctgaggtgggaggatcacttgagctgggaggtcgaggctgcagtgagccatgatcatgccactgcactccagcctgggcaacagagcaagaccctgtctcaaagaaacaaaaaagaaaatgatttcctgtctagaaatcaactttgagttattttaacatttgaatatgagagtagaagtcaaggcatcttcagacattctgggcttcaaaaaattaaccttgatacatcctgtcttggaagctactccatgatttatcgcaccaaatcccaccaggaagccaagaaagaagaatgaatgggatgcaagacacagggaacttaaccccgaggccatggaatctcccaggaggaggagaagggaaggcaagtcaggtcaaggacacagagcrggtgtgagrtggacacacaactgtccccgtcagatgagggagagatgtggccgagagaggaaggccactgccaggccacctgtcccgtctgagaatctggggatgcatcagtgataggttcttgaaaaccacacagaagacgacaaggaagttctcacctccagaaaaaagaaaaaagttgttacaagtaaggaaatgtacttatagtattctacattgtcatccaaaccctgaatattgatttaayggtgagtttccatattgagaggacgaggggaggagatagttgarggatggaatrcaatacctayatcctcatccctcatctttggtagtggaaagtccataagcgatagcaaatatggcaaaaatcaagaaataatgagccaggcttggtggtgcacacctgagactactcagctactcaggaggctgaggctggaggatagtttgagcccagcagttcaaatccagtttgggcaacatagtgagatcctgtctctgtattaaagaaaagacaaaaagcaatgaaatagacatgttatttagagacacagatgtacacatatactagtagaagcaattgagagttgaaagtggttgccttcggggaacaggagtcagcaatggggcaagagaccatcgtttttcattatattccctgcagtcctgtttatgtttcaaaactatatacatatgacttcgggccgggtgcaggggctcacacctgtaatcctagcactttgggaggctgaggcgagaggattgcttgagcccaggagtttgagactagcctgagccacacggggaggcttccatgtctacaaaaatttttttaaaaaattagttgaatgtgatggtgcattcctgtggtcctagctattcaggaggctaaggtgggaggatcacttgagcctgggaggtgaggctgcagtgagccatgatcctgctactctactctagcctggactaacagagtgagaccctgtcaaaaaaaaaaaaaaatctttggtaacaaaaataaataaaaatcactagtttagacaaattatgagaaagctaggaaggttccagatttttgtgagccttgtgtacttactaaaggattttgactcaagggcaatggggagtcaatggaagtgttgttgttgttgttgttgttgtttgagacaggatctcactctgtcgcccaggctggaatgtagcagcataatcatagttcactgtagccttgatctcccaggcacaagcagtcctcccacctcccctgcccaagtagctgggaccaagggcgcacactccaccacccccagctaatttttaaaaaatatttttgtagagatgggggtctccctctgttgcttaggctggtcaattgaagtttttgagcaggagtgtgaccgaagggctcagtctagtgggttactctgatggctatttgtaggctggatggagtggggaggttaattctggggtaggagcagtagtccaggggtgaggtgatacagatctggacataggaatggaaaatggaaagtcagtggcagggagactgaaaaagcagcagtcaggctgaatgattgatagcagcgggaatgatgttggcctggtttcatccctgggaggagaattgacatgaggagactgaagaaaggcctgggtgtggggagagagctgtggcattcaattgaatgaagggtgacagcyggtcatgaaggtgaggcactctagcaggcagaatccagacaaaatctgggaactgactgtgggtcctaggaaccacttgaggggaaaccatttttagggaggccttgagtttaaaaaaaaatcattgaggccgggtgcagtggctcacgcctgtaatctcagcactttgggaggccgaggtgggaggatcgtttgagtccaggagttcgagaccagtctgggcaacatggcgaaactccatctctactaaaaatataaacagtgagactctgtctcaaaacaaaacaaaaccaaagaccatgcaacatgtttacactggcaccttatatcaggtgagtttcagttgcaagtaacaaaagttgttagcaacattggcttaaataaggaagggaatgtattggctcatgtaactgaaaattctagatatcaatcctgattccaagcgaagcttgggctactcaacaatatcaccaaggaatkggcttttctcccatttttctgctctgccatccamtgggtcaacttcctattgtcttcgggtccaaaataatagccagtggcccccaggaccacatgcttcctcagtcatattcagaaaggatgagcaactattatttttcctagatttgctagcrgatgtcctgagattggctgtggctggctcaacatacatcacatgtgcacttctggtccaggcaaccatgcaactctgaggttgggaacagagtcagcttccccagaaccacatggatccccaaattagaaattgagagctaatggcaaggagggattgggtgctgcagaggcaaccacagatgtctgctataatcagctaagccccagcaacctctgtgacagggcctgcccggctgtgctaggcatcctgagacttttctagaattgggggatgggagtggggtggtcattatattcattctgaggttcctatttccagctgggaaaaacgcacagatccccgaggcaggttttactatgtggatcacaatactcggaccaccacctggcagcgtccgaccgcggagtacgtgcgcaactatgagcagtggcagtcgcagcggaatcagctccagggggccatgcagcacttcagccaaagattcctctaccaggtgagagggcaggcgcttggcccgaggtggggccgcctccctgcgcttgcgaatgtgcagccacgtgttctctgttgacctgcttagtgagcagggaaaacagcgtctggcaacgtcagtgctctgcccctggagattttactcatcacagtgaaattcctcaaattccagtgtgcctcactcagcagctccatatctagcctctgtgtttaaggaatcaacgtgtctaaaactgaattccccgtctttcttccgagatcggctttcatttctgcccccttcattcaagtccattttccctgacttgcaccctgacttgctttgacttctcccatccctcacctttccagatgaaagcaatcaccaggcaacatagtgagaccctgtctctaaaaaaaaacaaaaacaaaaacaaaaacctgctactgttttttgttagatctttattatctgacacattctcagggatgaaggatccttgggctcatctagatcagggattggcaaataatagtccatgggccaagctggcctgccacttcattttgttaataaagtttcattgaaacataagaacacccagcagtttacatattaatggtggctgctttcgtggtacaatggtagagttaagtatcacaataaagactgtacagctcagaaatcctaaagtagcctaagcctactgtctgaccctttgctgaaaaagtttgttatctttggtctagctgagcctccttctttctgatgcttgatcatcttctgccccttcccatctgaattgctagagcagcctctaaattgttctctccattggccttctctctcttccaatccatctggcctgttcccctcagagcagtcttcaaaygttactgtcattgcatccatttactggctcaaaaccttttgtggtctttacctaaagagtaacatttaaattttctttttccttttctttcttttttttttttttttgagatggagtcttgctctgttgcccatgctggagtgcagtggcacaatctcggctcactgcaacctctgtctcctaggttcaagcaattctcctgccccagcctcccaagtagctgggattacaggtgcccaccaccacacccggctaatttttgtatttttagtagagatggggttttgccatgttggccaggctggtcttgaactcctgacctcaagtgacctgccctcctcggcctcccaaagtgctgggattacaagcatgagccaccatccccgaccacatttaaattttcttttcttttcttatttcttttttttaagatggagttttgctcttgttgcccaagctggagtgcaatggcatgatctcagctccatccctgaccacatttaaattttcttttcttttcttttttcttttttttaagatggagtttcgctcttgttgcccaagctggagtgcaatggcatgatctcagctcactgtaacctccactgcccgggttcaagcaattctcctgcctcaccctcccaagtacctgggattacaggcacacgccaccgtgcctggctaattttttgtatttttagtagagacggggtttcaccatgttagtcaggctggtctcgaactcctgacctcaggtaatccgcccaccttggcctcccaaagtgctgggattgcaggtgtgaaccaccatgcctggcccacatttaaattttctcgtccagaattgtgggtgctctggtttcaaactaactgcctaaacagtctcctataccgtgtccctgtgggaaccctcccagttccacctgctggagtctccatcccattagagggtccacartgagctggaggtggggaagcccagctgcaaagcctctttggtagggagacgtgggactcccaagttggctgattatattttctcagagcactttagatgcgaaggttgggatctacagcagaactaacacaggatatgatggtgcattgcaggctggaaatgttttgagctgggtccctgactttttttttttttttttttttgagacaaggtctcattctgtgtcacccagggtggagtgcagtggcatgatcatggcttattgcagccttgacctcctgggctgaagtgatcctcccacctcagccccctcaagtagctgggactacaggcatgcacagtcacacctggctaattttttgtatttttagtagagatggggtttwgccatgttgcccaggctggtcttgaactcctgggctcaagcaatccacctgccttggcctcccaaagtgctgggattacaggtgtgagtcaccacacccagctgatggacccccgacttttaatcatcagccataagtcactgtagcatctcccttggttagttctgtctgtggggatggattgctcattgtacagggaggaaaccatggaggacctcagtttccttagcagaggtgagcagaaagtgtggtgtttgtcttagtaagttgctccagggtcgacgatcatgcccctctccagccagggccccgctgtctagcccagtgcgctctgcacactttcttgggctaggcttcccacccatgcctgccacacatgcctgacatccaattctggcatgtttcagaattggatggaatctggtctttcaccacatttcagagattgctccttttgagctgggcccaaaagattttgcctgccattttcttgggtggttgtggctgcaaaactgggaaggtctggggcatctttcttctttgacctatctgtcctttgacttagagacaaggacgtattttaggagtttcacatggtttttgtctacctgattatccaaaatttctcattaaaaaaaaaaaatggaaccgaatgttgtggtgcacacctgtaattccagcaacttggaagactggcgggtgggaggatcacttgagcccaggagtttgaggctgcagtgacctataatagtgccactgcactccagtctggatgacagtaagatcctgtctcaataaataaataaataaaataaaatgcattaaagcaatttttttttcccttaaaagccccactagttaggttctgtgggttgaccaagatgttggtgtgtgaaagggaagattcccagattctggagctcacatctgcctggtctttttggagtcttccttcctgcctgcctctcttagcaacattattctgggtttatagaggtagaactttgacttggagggttccctagaagtaaaaattaaacactaaaaaattcttctttctgagtactctaaaatggttttctcaggctcgctggggatgtgggagggttctgcatggaggtgatagttaccttttctccatgaaacaaaactcatattgaaaaatgtggcaggaatctttctttggtctgctttcaatgtctctctgttgattttcctccccctctggcattggttttctcctcttgtttgctatggtgccatgtcctggttacaagtaagaagggttgctttcatatagttattttggggtttggcttaggcccagagtttgactcggaagacttaagacccaatactagactagctagcggcctcccctcctcctcttgctgggcttcaactgagaccttgttcttctttgctgcactgcagagaacatgaaatacagttcaaaatggaaatcaagggaatcccagattgcagtctcctgtaattccttcctgctgtctgcctcaacacacaccttctccagttcctctaaattctggttcttagtttttctgccatgtttccctttcccaactcctagtgtgctaatgttgcccrtgatcatcgtgtatcttttcgtttgcttgcttcaccgttgcagtttctttttgccgtcttgtgtcgtgttcctgctgggacccactgaagatgcctggcacagccttgcacattgtgctgttgtgacgggactatcacacggccgacaatttctggggcatctctctctgcagtattgaaacagattrttttgactgggcgcggtggctcacgcctgtaatcccagcactttgggaggctgaggcaggcggatcacttgaggtcgggagttcaagaccatcctggccaacatggtgaaaccccgtctctactaaaaacacaaaaattagctgggcgtggtggcgggcacctttagtcccagctacttgggaggctgaggcaggagaatcgcttgaactcgggaggcagaggttggttgtggtgagctgagatcatgccactgcactccagccagagasacagagtgagactccatctcaaaaaaaaaaaaaaaaaggtaaaagaaacagattattttgtggctcttagggtgtggactccaaattgcattatcgagaaacagacaacttgtttcttactctgcaatgagccccttgcattgaattctcaagcacctggattttgttctgcatccgtctggtgcatccttaaaaaaaaaaaaaaatgcctgcgttccacgctgcaacctttatgcccttcccagacctttcttaccctcagctgtatttgctagacattctttatttctgagtttgtatcttaaaatattactggaactttgtgcttagttcccaagggacttgaactctcatgagctctctggctcatggcctgcaccccagatctcccaacccagggaccattacccgggaagaggattccacagtgttcttttctgttcctagtgatagagaacatctaggatctcccttctggctgcagagtcccgctttcccccatctccatccttttctgctccacgtaacaccttgacatctctcattttaggggaatgtggtagaagaggaggggcagccggttggctcattggaggtgtggggtttttggcttttggttttctggccatgatgcatagtttttatttttcatttcttcttgttccttccttctggctttatttttcaagttgtactgcgtaccttagggaagaagtatccaaaatcgtcaagtgcttctatttaacaatgaaaagtaaaattgttgtgaggatcagctcccattgattctgattttattaggttggtgcaaaagtaattgtggtttttgccacgactcttttttttttttgagacggagtctcgctctgttgcccaggttagagtgcagtggcgcaatctcggctcactgcaacctctgcctcctgggtttaagcgattatcctgcctcagcctactgagtagctgggattataggtgcctgccactatgcctggctaatttttgtattttcagtagagacagggtttccccatgttggccaggctggtctcgaactcctgacctcaagtgatccatccgcctcagactcccaaagtgctgggatcaccagcctgagccacggcacccggccgccatgactccacaattacttttgcaccaacctaataaatgttgtttgtgtttatcagtctctggtgtctctccctttcctgtctgcctcctcttctcctcgcttcttataggtgtgtgtgttgggggggtggggggggtgcgttctgatagaataacaaacagaggataccaaggaaattttttaaaaaccctttaacgaaagagagccaacattgcatgaaggctgagattttttttaaaaggcaaggattcagaaaagggctgatcagtattttctgatcctagttcagtgctagtcagggagactgtcagtaaagacctttttggtctgttgatttgtagaattaagcaaaagatgaccatgcccctgtggaagctgggttggtaccagctggtagctgatttcccaggagaaccctgaacgctttacagatgatctactgactccaaaacaagacctgaagcagcaaacacttttacaccaaatgcgtcttcttttaatgtcttaaaataaccttttctatagtccttcccttttgcaaggtcactgctgtagctcagcacttacccagtgcctctggctccatgatgtagaatacgtgtgttttctcatttgttcctttgcctctgttgccgaatgtttttaatgtgttaactacaaaacagagttggaggaacttggattttatgagatgctgtaccctatctcccccaaccccccaacacacagacacacgcccccatgacttggaattcgggagatttttttcagtaatgattcaacgtgatttgtgatggagaattttaggcacagcttgagatcaatgataaggggccctaaatcaaggtgagcttcccccacctccgtgcacttgcattctgtgtgggcaggaggccctgccctgaaagggggctccgtcctgtcaagagcctatggtttcaagacttaaacatctttgttggaacttgcttggaagaggggcctgtgttgccaccttggaaagaaagtttctctgtcctttcagctgggggtggagggagggctgtggaagggggcttgctggcagttgagttccaccaatgttttctcaagccgacactgagccccattcatcctcctgcccatgtgtggctccggcacccctagacggggccagcccagcagcctgaagtccgcatttagaacttgatcccctcttataacgattaaattttagtaagtaaaataaaaatgcttcagaaagaaaaaaaagaaaggaagaaagagtggaacaatacttgttttatttaacgaccagaactttttgacaacaccccccttccccgcaggatatgagaatgcctggtccactgcagtccatccccagggacctcgaagcagaatttggctggagggggtgygggggggattctaatgtaaacagtgaccctgaagccctggagccagttcccccttctttcccctgtctccccttctgtcttgctgccccacccccagccccaacaccccccaccccccccacccccaccccgagacaaacacagaacactgagcaacttcaggttcaggcaggggaggaataaaggtgctttgtaaaggggaaggaaaacattcctgggggaggtgagggcttggggcatgaatgtgccctcagtctgggtggacgctgcacacccagatgggaggttgggggggacgccgaggtggagggaggagggccgggccccagccaggaagctctgggcgtgggcagggcttgtgggaatgatttcattggaaaggcctgcgatattttttcccctcctgcgtgtggttcttggagaaagttggaggtggtggtgatttcagtcgccttggccgccttgagccggagctgagcggaggcactgggccgagcctgcttcccgggccttcctaccatgccagggctgctccctgcctccgccaccctggcacaccttcacccgcgtaccgcctcctccccgtcgctctgccttttccaaaactcacttgggccctccgtgcgcagggttcttttttggtttttctgtaaaaatcaaaacaaaaaacagagacttttgagaggagcagatgccacctaaagtcccactgcattccctgcaaagcrctcaaatgtggaagccagtcattggcatttttattttttattgattgattgattttttcaccagtggctttttgtaacctctgtgttctgctgtgtttcttgtgtttagtcttcgagtgcttcgactgaccatgatcccctgggccccctccctcctggctggggtaagtactgagttctcttcctggcccttggccttccgtcagccacggtgctctgtcctctcctcccgcgtgtcttccttccctgttcctgtccctctgttttccatctctcccctctccagcacactctctgggcatgccccaccagagcaattacaggtgatggagctgggcagctgggaaagtaaccaagctccaccgaaccactgtagcatccacccaccatcgctaaaggagtgtgaccctaagaaaagatgtccctgagcagctggggggctattggcttttggtcttgagtttcaaggtgtctactcaagagtccatgctaccactaagatattttgacactgcctaactcccaaatggatttgtttcagatctgtgaccgtatggttggaatgatccaccctaacaaatctttctttgcagctgasatgttggaggactttggtctaattttgactaatagaagccacctttttatttctgacatagctgtgaaagaggccagagggaagcagatacgagagttgaatgccaggtggtgactctggaaacgcatcgctgctagttattatcgccgtgtagatttctcctcgcscttggtagccgcctcttacctatcccaagtccttgatgtgatttgctgacagtgagttaagggatggacatccatgacttaggagagatgataggcttcatggctattctaggaaagagtagccatgcaaaaagggtcattagagatgatgagacttagcgcatttgatagagctggggcagagttttatttaatcttgtgagagtcactgggagcagaagaaagcagtttttgcgggaaccagcatgtgttgggtttcatttattggttaggccrgcagaagacggtaaacgttggtttggtggtgttgacagatggtgtgaaactgggagggggtgcgctcgacaacaaagatggagaggtgcatcctgggaagttggcagtgataggatgggcatctgatgcctggaaacatgcaggtttggagctggatcttctcgatgcagacacttctgctctcgggtagttatttaagaggttgtgtcaaccctgttatacctgcarggtaccacttagtcaatgagcactgcagtccagtgtgccagaagggccttctggtccttctgattggagagatcatttagtgaagcttccacacatttgttgatgttcagctyggggatcccttacgcagatagctgccccacatggctccctggaccaaagaaagatcattagtatctcagagattggcagcaactccaatgcgagagagtaaaactctgaagaccctgcgtcgtcagtaggcaggggaaaatgcgtcagattaaacaagaatctgtactgctgtttagtagccagtggcatagaagccggggacttctagtgtatttcaggctctgtagaggcaggtgatgtagcccagtcaagtgggttttcatgccagttctgctgagtgatggtcaccaggtaagcacagctgatggagacttgaaaacagctctcgaatgctaagtgtggaaatatttgagatagaaatggaggagccgtggtcagagtcgatrckgttaatgaacgatcagaaaaaaacccacaaaactgtcatagtctagaattaagaggaagaacattctggctaaaggccagggctccttctgaatctcagatccttggggatctgtgttggctgccccagggctgtggctggggccggctccccagggctcaccgasaatgaacaggaagaacagccagaccaagtgagagtgatcggcagcttgctaacccagcctgctggtgtccctctctgctgccccaggagagaccccgcatcttccccacacactgctgtgggactcaggacacctcgggttcagatccacatctgccctcggcagccctgaccctgggcctgtggctgaatatgtctgagtccctttgtcctaaaatgaggtcgagccaggtgttcctggggtctttcccagcccccaactgaaactgaatgccgcgaggcagccagccggccttgggaggcctccacacagcagcagtgccagaaatgacgacacaggcctcaagcccgctggacagatccccctggccctgtggttagccttggctttggcccttaacagggcagacgtggaggatctagttcaaagcagtagcttcggggctgggagcagcccctcccctggaaacctcttgggaagccttccttctgtgtgttctgaggtggtggtagctctgtaacagctctgggcacctcctgttctttctttcctttggctttcttttatttattttttatttacaaaatagagatgaagtctcgcygtgttgcccaggctggtctcgaactcctgggctcgagcgatcctcctgcctcagcctcccaaagtgctgggattacaggcgtgatccaccgtgcccagcctgtctttatttttattttatttatttgtttttccagctttactgaggtatgattgacaaataatgtctgtttgtaaaatttcagtcgagtcatagataccaggtaaggcagagagtgggagggagactgaggccttggtctggtgttgggagcactgcagctcgagtcttggagtcaggagggggttgttgcacttccctgttctgctcctttttcagctttctggttccctgtagcttctggaactgattatttttgtttctttaatgctgccctgtcttgtaaaaggagagccattagcatcatttgttttcaggagagaagcagatttgaaggctcaggaacttcctgggaaaggtgacctcttttgagccaagagctttaccccctagttttttgttttttttttctcctgtctacctggagctgagaggttatccctttcaatccctctcaaggtccagaatcaccagctagggttgggtctgcccctggagcacagactcctcccttggggaccgcagagcccttatcagtatatcagtaaagggcaagagaacagagattgttcagagcagaggaaaagtgtatttgttccccagccccactccatgaatattcccctgtctcaaagcacatacttaggcctaagaacaggataggcaggccaggcacggtggcttattgcctgtaatcccagtactttgggaggctgaggcgggaggatcacttgaggccaggagttcgagaccagccaggacaacatagcgagaccctgtctttatataaaaaagaaaaaaaagatacaagtctaagaagaggctgggcagtgtaagtgtcctcagccccagatatcatttatttgcttataagcaagaaagaggcgtgccagggtatgagagttttagaacaagacttagcctgtaagtgggagaagagggagaacttggagggtacaggggcgcagggtgcagagcactgatcagagaggtgcgagggaaatgcagccactccataaggaccacgccctgtaggacagaggcgcccaggttagctgcatgcagtgcagagggtcccaggaccagggatcagctgtgagggacttgggtggggggcctggcgggttagggactgcccggcttccatgctgcacacagctgggagcaattatgcctctggtttgagctgtgctgctccctctgggtggccacaccaccccctccctccgaccaaycaaccaaagaagtgcttcatctcgagttggaagtatgtcacccccgccccccaccaccaacaaggaaggaccctctttgtccctttcccagtgacaagtgtgagtgagcttggctttggctggttcttctctaacaggctgacaacagggagataaactcagacccagcacccaggaggtgggaacctcagggaaaggacaccggctctccgtgtttgaatctgatgttctttctttcttctcatgtggcagagaaragacaggacaatggacgggtgtattacgtgaaccataacactcgcacracccagtgggaggatccccggacccaggggtaaggacttgggctgagaggggggccgggctgggctgggtctctgtgcagctccagcactgggcaggtggctttggactgcatcgtcccagagggctgatgtcagggacctttagccacacacaagtgtcttgagactctcaccgtacagatacactgttggcctgatgagagcttaaaaggggtttcttaaatagaccttcctggtggatggagggcggcccggctggcgggtgttgctggtctccatactgattgtgctggctgctgataattggattgcaaaaaggttgagggcatcctggtctcccaacacccccaagtgaagctgtgctggggcacagggtgcctcaggattgctggtggctgctcagtccaatgccatccatgcagggctgggtttttggccatgagataataagtgacctctccgtgctgcagaactgttctcacracttgggtcrtgcttcttgggtgcatgtcctcaaagtccctcatgrgctctgcagagacaaagccacactttgaggacccagcctccaaccaccaaggtccagaaggtggggccagsccttcacccttttcttcccgtgtttccaggatgatccaggaaccagctctgcccccaggatgggagatgaaatacaccagcgagggggtgcgatactttgtggaccacaatacccgcaccaccacctttaaggatcctcgcccggggtttgagtcggggtaaggactttgtgcaggtagcagcagtgtcaggagccgaggcccaggctgtccttgttctggctctgggaggcccactttgggtggcccctgtggtgcgttctactgcccttactgccctctagtggccaatgttgatgtcatattaaaggggatgggaggatagcttgagcccaggagtttgagaccagcctggacaacatagcgagaccgtgtctccacaacaataaaaaagattaaccaggctgagaaaaatggcaagaccccatctctacaaaaaaaaattaaaaattagctggatgtggtggtgcatgcctgtagtcccagctacataggaggctgaggtgggaggatcccttgagctcaggagtttgaggctgcagtgagctatgatggcaccactgcactccagctcaggtgacagagtgagtccctgtttctaaaaaataataatacatttaaaattagctcggtgtggtagcacactcctgtagtcctagctacttggaaagctaaagcgggaggatcgcttaagaccaggaattcgaggccgcagtgagccatgatcacaccactgcactgcagcctgggtgacagagcaagaccccgtctctagaaaacgaacaaacaaataaataagatgggatggggaggaagggactatcctgtttattccgaatgacactagagttatttctctaaaagcaagaagtctggctttatttctagattttyttttttattcttcaaggatcttaatgacagtcacttcctcaccttacattactaatctttaaattaacatagcaccagctttccttagggctgacaaagacaaattgttcattttctgagaaatcgcwtgaacccctgaacatctttgctcttcctaggacgaagcaaggttcccctggtgcttatgaccgcagttttcggtggaagtatcaccagttccgtttcctctgccatgtgagttctggtactggggctcccrtggcagttggggttattgagttatttcagtgtgagttcccggcacagcagcaggtatcggaatgtttgtgtcttaggcgggcgcaagacacttgtctaacccggagctggctgtctctaggaagckagttttcattcctagggcacatgctattgcctcctggcccagcaggctggggaatgcctgttcatacagacaggagaacagatgaccacttgaggctcgatttaaagttcttttcttttttttttttcagtcaaatgccctacctagccacgtgaagatcagcgtttccaggcagacgcttttcgaagattccttccaacaggttagatcatggtgcccgaaaccagtggcaggccgacgccctcctcccagcaccccatctcctatcgcgtggcctgttaaacccacactgcagactttccagggcgtgrgtcttggtgactgtgtctgctggatattggsccttagagtcccctgtccctcccgcccctgcctgctgtggaagggagagtggcaggctggcccgatgctctgtcttcccagatcatgaacatgaaaccctatgacctgcgccgccggctctacatcatcatgcgtggcgaggagggcctggactatgggggcatcgccaggtgagcttgagtgccccggaaggctgccctgtaccccgcttccccaggctacagcatcaatggccagaaagctgcctgccccctgctcacattccctcccaaagctctcatgcatcttcaggaatgggcacagtgtggcattcaaaatacgtgaacccgccaggcgcggtggctcacgcctrtaatcccagcactttgggaggctgaggcaggtggatcacctgaggtcgggggttcgagaccagcctgaccaacatggagaaaccccgtctctattaaaaatacacaattagctgggcgtggtggtgcatgcctgtaatcccagctcctggggaggctgaggcrggagaatcgctygaacctgggaggcaggaggttgcagtgagccgagatcgtgccattgcactccatcctgggcaacaagagcgaaactccatctcaaaaacaaaacaaacaaaaaaacaaaatacgtgaatccatgtggccagtccattgggcctggaacaggggcctggggtgccccrctgggctggacattaagcctttagttactgggtcatgaggcgacrgaggactcctgggaggggcgagagctcagtacaatggctctgttatctaccaatgtgtcatgtttctgtactttaacaaccaggccagcagcatctgggcagttgaatataggggccatgtggtcatccattagagttgaccctgggatcccctcctcttaaggcagccagggcaggtgaagtcaggtgtccccgtgtggataagctgtgtcacgatccacagggccttgagcagggctcaactgcatgtcacatgcctggggtcagtaaaactgtaacggcttatgtcaccctaaaaagagtccaaagcattgtcttgccttcaccctggtccacccataaaagttaacaggccctctgggaaatgctgccttggacagcagggcagaagggccccggcagagagagagagcgctgtggcccgcagcgacctctccgctcgagacctctcccggtgtgggcatgtcttcccgcttggtgttgggttaacttgcttctggtcctctgttcggtggtggcgttgccttctgcgctggccccgtggatggatgttccttttttccgtggtgacctcctctccaggctctgcttggtgggcttctggtgtggccgcgccctgtgtgtgtctctctctgtgtcctgccagtggttttaccctatggtaggttacgtcatgctgttctaccacagggtagaaccacggacaggataccggggcaccctctgcgtcracggactcctcgtctgcccagccacaaacagcccagcagctggggactggcccccttgggacatccccttgctggtttagctcaagcccaaaaggactctgaattcatgcctgaggctcgcacccagggcacgggtgttggttcagatgaatgcgtggaagtgtgggaacggggatggtgttggggtctgggggtgaagggagggcaaagtgcaagagtgttgcatagctggtgggcatgaggtttctcatctgaaggcagcatggattacattgtcatggatcggggttggaaatgtgttgctgtgtatttacgttatgttgcccgcccaggtagagtggaaacagggtagttactattcaaacagaacctttgcagaaaaattattgtaataaacatgcatcgtgcccttgtgcagtgcacagcctaggcaactgagcatggtgacccagggtacaaggaccccctttaccattagaagctctggatattgtgatgtaaagtcttggaacacatcacctgggagccgacaatcacacgttttcccaaatatcatcctcaaatgcagttgccgccctggttcactgtaggtctgagcctgccctgttcactgaccagctgttcatataggttagcccgggtgcttgtcacagggctcgactccctgggacacgtgtccccatactaacctgagacacgatggtgaagagacacagctcctgtgcagatgtgcacgaagggacccattattcttgtcttttctgtctcttccctcacagagagtggtttttcctcctgtctcaygaggtgctcaaccctatgtattgtttatttgaatatgccggaaagaacaattactgcctgcagatcaacccygcctcctccatcaacccggaccacctcacctactttcgctttataggcagattcatcgccatggtaagggggccccaggggtctgcctagttccctcctcctctccctcctcttccctctcctggtgaagtgtgccaggggcaccaggggaatctgctctttctctgagacctccaggaaggggcagcattggaggaggccctgggcctgttcaccaggaggcagcgtggcatgaacggcagcccccgtggactggctcaccctctcggggctccaccctttgcccccatagagctcgtaacctaaaaatgcaagaagctagagagagttctggagaaaccagagctttctcagtggctgccctgtaggtagtgaagagtttccatgttgctttgtacaggacttgtcaagagggagcccagggtcgctgggccacagactttactgaacattaaatatgtgctctgttgagggccttgggatgacagggccaggtgaaaccatagctgcccacctgctgcctgtctctgggaggtgacactgtcacggcatttgggaatgtcccactgagacactaagccttctggaagggcatttggaatcaacactagtgtagaacaaaacgtaaagtctgtggcccacagaccctgggccccctcttgacaagtcctatgcaaagcaacatggaaactcttcagtacctacagggcagccactgagaaagctctggtttctccagaactatctccagctttttgcatttttaggttaccagctctatgggggcgaagggtagagcccagagagggcgcgccagtccatgggcgctgccgttcacgccacgctgcctcctggtgaacagtagactggctggtgcagggtgtagggacatctgtcagaaagtgagccagttctggggaggagcgtcccagcgtctgtatttaactggaaagagggacacaatgtgaatatggaaagggaggtcctgccacgtgccccgttgagggtcctgggagcgtggagaacccggattgagaagcggagcccgtgggaggcacagcgcgggagccacatgcatagctggagatgtttcaattctcctttccttcgcttcttcccctgccttcctgagtgtcccacccggctcccctcttaggaggacccaagcgccccatgagcctgtgactaaatatggccggcccttcccatcgtcgaggagttcttggccaaggtgctgggctctggaaatgggcacattcttcccaggtctagagacccgcctggcccagcagccagcaggacagaccggtaaaaccctagactattactcaccattggccgccagctctcgctgtcggcggtgtctgcattatttttggctgcctttgccacccaccctgagcgccagtgaatcagggctgccacctgcagctgttcagagcaagccttttctgtgagcgtggggcagacctttgctaggccaggagccagccggccagcgtgcggggcagatgcgggcccggacgtgggttcccgcaccagctggctctgcccagtccttgcggtctgcagggcagggtgggagtccctctgtaggtacaagtcaggataaaggcgttgtttactcctgaggccctcccgctgcgtccgaggcagctgctgctgtagttctgtcagggaaggaaggcgggtagcggtagcagagtttgataccgagcatctgagagctggtcttggcagtgcccagggaaggccaaacctctgtgctgtgcctcttccttcccaggcgctgtaccatggaaagttcatcgacacgggcttcaccctccctttctacaagcggatgctcaataagagaccaaccctgaaagacctggagtccattgaccctgagttctacaactccattgtctggatcaagtgagttccctgcccccttgccccaccgcgctgataggagggacgtctctgggtgggaagcaggtactgatggcctttattttgtctgccagtgtggcccstgagctcttktccagcctctataagagcttgtggagaggaatgtcctctgggttccctggggacagttctagaaccttctccttgagtcaaggagctgtcccctgtcactgttcaggattctaggccacctgtgggcccttggtgtcccacgggcaacagagcaggatccaggaaagaccctgacacggtagacatctccccacttggtctcctgtgcccccagagagaacaacctggaagaatgtggcctggagctgtacttcatccaggacatggagatactgggcaaggtgacgacccacgagctgaaggagggcggcgagagcatccgggtcacrgaggagaacaaggaagagtacatcatgtgagtctcagrcgcygggggctccgctccaggggtggcgtggagatctagtgggttgcagagaaagatgggcccccacctgtggcccatcggtcactgtggatgccatttgcatttgccttgatggtggctgctggtgggcggtcatgtgatggcgcgagctgggggaaccaragccgaggtccttagttaccgactcccagctgtgctttttcgccatgtgggagacttcaagcctgcagcgtggaatttctttgaagtggcatcaagctgagacatctgcatctttctccgggccgaaaggatctctgtggcctgtgtgcctagacccaccgtctcacgtgtgcccgttctccgtgcctgttcctcaggcctcttgctttagtctttatctccacgcttccatacgtctgaggttcagtcggcgctgggggcaggagcaggaggaggtggtggtgaggatgatttcaaagactccggtgtctgcaggtcactgtgaggttttcagggcctcactctaggtcctccagcaggctgggtctgggtgtgcgaagtgggctctgctgatctggtggtcctgcgcggtaacggccacgcggcctggccgggagccacccctgagcagtgggtctcagactccacccatggctgctctttggtctcaggctgctgactgactggcgtttcacccgaggcgtggaagagcagaccaaagccttcctggatggcttcaacgaggtggccccgctggagtggctgcgctactttgacgagaaagagctggaggtgagtgtctgaggttgctgggaccctgagcccctgcctctggggcgatcctgctctgtgatacgctcactgtgtacccacagacactcagcgtaaaactcccacttcggcagggcagatgggtttgatttgggacccacccttccccagacacttgtttcaagaaagcagggacttacattacccatattattaacgctgacaccaaaaatagctagttgaatatgtttggggtaatgtcaagtgctagcgagtggacgatgcgcggggagggacctgccggggatgctgactgccgcctctccccagctgatgctgtgcggcatgcaggagatagacatgagcgactggcagaagagcaccatctaccggcactacaccaagaacagcaagcagatccastggttctggcaggtgggtcccgggcccaggccttggcagggacatttgggccatcaaccaaaggaaacgggtcctgaggaggcctcacgcgcaaggaccttcagctttggccctgtccttgcctcccacaccttgcaaaaggagacgatagaccagccttgggatgaacggggacagttccagctgagtggtggccagtggatgtgacaggaggtcgtcagtggtcagccttgggccagctggtgtgcagggacagacctgcaggcagacagcagctgccactggttgagaggtcccctgccagccagatgggacaggaaggcaggggcttggctccagaaaccagaaagagctgtcatcctatgtataattaatgtgttgattcttttatacgtatgggttttgttgttgtcgttatgaartacagcatacaaaaaaaaatagcgattacagatattcttagtacatgtctgtgtgcatatgtacgtatacaaattttttgtggaggtgaaatttgtataacatacaattaactattaattttttttttttcaatagagacagggtcttgctatggtgcccagcctggtcctgaactcctgggctcaagcagtccttccatctcaccctcccaaagtgctgggattacaggcgtgagccactgtgcccaacccatttaagttttttaagatacacaattcagtggctttccactttgggttccttggcttcccacccaggccgaggtgggcagatcacttgaggtcaggagttcaagaccagcctggccaaaatagtgaaaccctctttctactaacaatataaaaaattagccaggcatggtggtggacacctgtaatcccagctactcgggaagctgatgcatgagaatcacttgaacctgggaggtggagactgcagtgagctggaccgtgccactgcwctgcagtgagctggaccgtgccactgcactccagcctgggcgacagagcagtggcttccagtacattcacagtgttgtgcacctggcaccactatctaattctggaacatttcatctccccaaaaaccttatacccattaagcagtcactcccatatttagtcatctctaaaagcagaacgtggatgggaagagaatacccagcctgaggtgtccctgagacccagagatgtcccatggactggtgggaatctcatgcacacacagcctcttagcaaaagcacttctggggtttctcaggttggaggctgtcatcccctggccaacctggctttgtgttctcagccccaaagaggggccccgctgagctagagagctccacgttcgggcaaagtactgggccccgtgggttgcctgactgtgccttgacttgcggacttccaggtggtgaaggagatggacaacgagaagaggatccggctgctgcagtttgtcaccggtacctgccgcctgcccgtcgggggatttgccgaactcatcggtatgttttctctcgccytctggcgtcctggctggcagtgcggacagctcagagggagggggaaacctagtctcttcctggaagcacgtcagtgggatggrgaagagctgtggcctctgcatcctggggccgagcccatctgtgggtggagccggaggatcctgctttgggaagggacgtctctgctgacgtcggcgtgttttaccttggatcacaggtagcaacggaccacagaagttttgcattgacaaagttggcaaggaaacctggytgcccagaagccacacctggtgagcctgctggttttagtgggaggtcggggggcctcagacccgatgagctcctgggacagcccagtgggtgtagcagcttcatagcctcgagtctggcagcttttgcgtggccctggggtgttgggttggagagatggggctgtgatgggcatctgatctaccgggttttacatatgaagcacttctgttccagtagtccaagagctactgccccaagtgtcccccgcaaccaatttccagctgtcctggcccctcccttaacaccccatggtccaggcacctgcaatgtgaaggcctgactggagcccctgagccctagccagtgtggtgcaagscytgtggccctgctgcaggcaggcatggtggggctatcagagccctggcctcctagggctgactgtcgtgcttccccactctcaatagcttcaaccgtctggatcttccaccctacaagagctacgaacagctgagagagaagctgctgtatgccattgaggagaccgarggctttggacaggagtaaccgaggccgcccctcccacgccccccagcgcacatgtagtcctgagtcctccctgcctgagaggccactggccccgcagcccttgggaggcccccgtggatgtggccctgtgtgggaccacactgtcatctcgctgctggcagaaaagcctgatcccaggaggccctgcagttcccccgacccgcggatggcagtctggaataaagccccctagttgcctttggccccacctttgcaaagttccagagggctgaccctctctgcaaaactctcccctgtcctctagaccccaccctgggtgtatgtgagtgtgcaagggaaggtgttgcatccccaggggctgccgcagaggccggagacctcctggactagttcggcgaggagactggccactgggggtggctgttcgggactgagagcgccaagggtctttgccagcaaaggaggttctgcctgtaattgagcctctctgatgatggagatgaagtgaaggtctgagggagcgggccctggggcgaggccatctctgcctgcctccctagcaggcgccagcggtggaggctgagtcgcaggacacatgccggccagttaattcattctcagcmaatgaaggtttgtctaagctgcctgggtatccacgggacaaaaacagcaaactccctcagactttgtccatgtataaacttgaagtggttgtgttgtrgggttgcaggttttttgttacgctgctgtcactttctgtccaggagctggcaccccaggtgttctgagaccttgagggacccagacctttgggtccaagagtttcccaaacarccacgcctctcaggaacccacctggcggttccgtgagctcaggcaggcctgacccggcggcacagcctggcagggacctcgtccccaagcctggcagaatgagaggggttgaggtcccgagcgccactcctagccttgccgccttcaatagagaagaaatccctttgctagatagggtcccccaggcagtccccagtggcgggacacaggggtccggctgtggagctcccctgccagcccctggagctccaggagggcctgttggtcccctgttcagaatggagtgcagcccgccagcggaaagtgttcattctgcataggtgtgaggctttatctgcacacaggacatgaaaaccagcagaaaggccctgagctgctgcatagccccatctgatttctgcagttcccgccagcctccaacacggggactctgccgtaactggaatcttcataggtcatattgaaatcttcaaggtgaccatgccccaccggggtgctggggcagtagtcatggcagactcccggcctgggcccccaggattctaggacccccaggcagccccttggactggtcccgggtgccttccaagcacagtctccatgctcccagattctcgaccttcccccggcccgggaggtgcagcctgcgtctgcctctgtcgtgtgtgctgatttgagtggcttagcttgccacagcgcarcctcttctgtccctttcagtcatttgctgtacttccctgtggcacgttaccatggaagccgctccagggtgggtcagggtgcaagctgctggtgaggtttggaagcatcaggctcacgggtgttcatgtgtgttcgtgcgtgtgtgtgcgtacgtgtatataactgaagtgtctgtacggaatgccctttgctagccatgggctggtcaccagattgttttgtaatgcccgccccttgcctcgatattgccagtttcttgtgcaataaactatcagcagctgtgggtggtgttgttgtggatgtttacaaagccacagtcctccagtcaagaggactccgggcctcacagaccctccaggcctggataggggtggaaattccctgacctcgctggttttgagaagcatgtgtgtcatggaccgaggcagcccccgacttctgggctgggcagctgagtcctggcccaggggtcaccggcttcagcccttggtcagctgcctcaccgtaccctttcggcaccctctgcctccgcctgctggacccgggggtctccaagcagttgctgtggggtgcagaacaataacagctacagactgggtgggcttccgaaactggcttgcagggagagtgttccaggcagtcattcatttgggaaatactcaggtttcacaagttccacgacggtcgagggactctgtgatcttgacctcagggtcacgtaagggctcgccacccacttttttttgtttttgacagatcaccatgctggcgggtcttgatgcatttgacaaggaagtgactttgtcatggaccaagcagggccccgactgtgcctccgatgctcagcggggcagacctgttcagagcgagctccctcctgggttcgtcagctggactcactgcctccagctccaaaaccttattttcaggcaacaggccaaggctgtacttggacaaaattactggaaaaggtccagatgtctcatgataaattcaataagacatgccccagtggaaatcgttcccccaacccttgtccccagagggacctactattcacagttggcggtggcatttccagacgcttctgtgcgggtgggcaaatcgtttacacatacgatttttaaatataccaaaaatggaatattgtacacactgcgcaactcacttttttcattaaatgagatgctatggacccctttccatgttcatcgaagtagacactgcttaactctttagccacagtgtgatattctgtatgattgcagttctgtaatatgctcacctccttcctaaaggaggtggcagttgtgtcccacagtttgctggtggctgtggagctccgggaaacgccctcgggcaggtctgtgtgctgctgctgctgctgctctcctgctaggggacggtcctagaagtttgattgttgatcatgcacctttatttttctttaaaaatttggtgaaggttcagttgaaagatgcaaaggagctgctgtgtaaggcttcccttactcttctgtcccttggccaccctgatgccttccaggaggcaaccatcgctgctggcttcttttggatctttccagatatactttaaaaatcccagcggggacaggtgtggtggctcacatctgtaatcccagcactttggggatttttagtagacatagggtttcgccatgttggccaggctggtctcaaactactgacctcagttgatcctcccgcctcggcttcccaaagtgctgggatcacaggcatgagccactgcatgcctggctgtttttgttttgttttttattgtggtaaaatacacaaattgctatcttaatcatttttaagtgcacaattcagtggtattaaatacattcataacgttgtgtatccatcaccatcatccatctccagaactcttttcgtcttgcagaatggaaactctgacgcattcctcttccccgcattcctcttccccgcattcctcttccccgcttccccgcagcccgtggcaaccaccattctcctttctgtccctttgattgtgactcctcttaactacctccttacgagtggaatcatatagtacttgtcgtttcgtgactggtttattccacttaacataatgtcctcgttgtgacttgtttatttctaaaagtaaccactggcgccttggtgcagatggaactccaggtgcatgcggtgagttaaccatggtctggggagctttgtttccacgcctaggacatgcatctgtgtgcatgatatgtgagctgatatagccatgcctctggtgatttgaacgcctgcgcttcccagctgcttcagggccctgaacatcgctggatgtttgtacttcattccctcctcagcccagctggtcccactccgcagctgtgctctaggcatttcatctcaactgggtgatatatttgaatacagcaattataagaacagcaacctcagaagaacatctggcatccagacctccccagcctagttccacaaggtaccaacttccgtaagccttgaagagctaagtaagtcatccgggccgggtgtggtggctcatgcctstaatcccagcactttggaaggccaaggcgggcagatcacttgaggtcaggagttcaaaaccagtctggccaacatggtgaaacgccatctctactaaaaatacaaaaattagccgggtgtggtagtgcatatctataatcccagctacttgagaggctgaagcaggagaatcgcttgaacccgggaggcagaggttgcagtgagccaaaaccgcaccactgcactccagcctgggcaacagatcccttggtatagatacggggagcttgggtggtctcatcacagcagaacgtcagctcttggcatgttcttttcctttgctaccagcttttgaaactgaagtgtagcagagtcatgaaccagactttgaaacatgaaccagacagagaaacattttaagaagtagcggctgaccaggagttggagattgcagtgcactatgattgcacctatgaatagccactgcactccagcctgggcaacagagtgagacccctatctaaaaaaaagaaaaagaagggccaggcacggtggctcatgattgtaatcccagcactttgggaggccaaggcaggtggatcacaaggtcagatcaagaccatcctggctcacacagtgaaaccccatctctactaaagatacaaaaagttagccgggtgtggtggtgggtgcctgtagtcccggctactcgggaagctgaggcaggagaatggtgtaaacccgggaggcggagcttgcagtgagctgagatggcgccactgcactccagcctgggcgacagagcgatactccgtctcaaaaaaaagaaaaaaaagaatagggccgggcgcggtggctcacaactgtaatgccagcgctttgggaggccaaggcaggaggatcgcttgagcccaggagttttagaccagcctagacaacatggcaagaccccgtctctaccaaaaatacaaaaaattagccgggcatggtggtgcatgcccatagtcccaactacctgggacgctgaggtgggaggatcacctgaaccccggagccgtgagcacaccactgtactccagcctgggtgacagagtgagaccctgtctggaaaaaaaaaaaaaaagtagctgggtatggtggcacgtgcctatcgtcctacctgctcaggaggctgaggcatgaggatggcttgagcccaggaattcgaggctactcagcaattatggtaccactgcactccagcctgggtgacaaagtgagaccctcaaataaaataaattggccataaatgtaagttttttcctgtattgttcattctgttcccttgatctatatgtcttgtcctttttccgtatcttatagatgtgattactagaagtttcatagcaagttttgaaatcaggtagtatacattctccagttttattctttttcaaatgtgttttggttattctaattcctttgcctttccgtgcaaattttgagatccagttttcaaattttttttgagatggatcttgctatattgcccaggctggtctcaaactccagggctcaagggatcctcttgcctcagtctcccaaatagctgggattacagggcacatgccaccaaacctggcctctcaattgctttaaaataaacacaacaacaacaaaaatcttttggaagtttgatgggcattgcattgaattaatagacaaatttggggagaattaccatctatcttaacaatattgagtcttcccctggccaacatggtgaaatctgtctctactaaaaatacaaaaattggccaggtgcagtggctcatgcctgtaatttcagcactttgggaggccaaggtgggtggctcacttgaggtcaggagttcaagacctgcctggccaacatggtgaaaccatgtctctactaaaaatacaaaaattagccgggtgtggtggcgggcgcctgtgatccaagctacttgggaggctgaggcaggagaatcacttaaaccgaaggggtggaagttgcagtgagcccagatcgcgccactgcactccagcctcagtgacagagtgagactctgtctcaaaaaaaaaaaaagaaaagaaaaaaaaagaaattagctggacatggtggcaggtgcttgtaatctcagctacatgggaggctgaggcaggagaatcacgtgaacccaggaggcggaggttgcagtaggaagagatcaggccactgcactccagcctggacgacagagcaagactcagtctcaaaaaacaaacaataaaacaatattgagtcttctattccatgaatgtgaaatgtctatgcatttttttagatctttagtttctctcagcaatgttgttttacagttttatgtgtatggatttttttttttttttttttttttttgagaatgagtcactctgtcgcctagtctggagtgcagtggcgcaatctcggctcactgtaacctccgcctcccgggttcaagcaattctcctgcctcagcctcctgagtagagtagctgggattacagttgcccaccaccacgcctggctaattttttgtatttttagtagagatgaggtttcaccatgttggccaggctggtcttgaactcctgacctcaagcaatccatctgcctcggtctcggaaagtgctgggattacaggtgtcagccactgtgcctggccatgtgtggaactgtttcctcaatttcattttcagattgtttattgccaatgtgtagaaatgcagtggattttggtatgttaattttgtattctgagacctttattctagtagggtttttttttttttatacattccttcggattttctacagtagaattatgtcatctgcaaatgaagatagttttacttctttcttttcagtgtggatgcctttaatgtctttttcttaacttattgcacaaattgcgcattcagtagtacaatgtttagtgggaccggtgagaaaagacatccttgccttgttttgatcttagggaggaaagtctttggtctcactgttaagtgtgatattagctgtacgttttgcgtaagggctgtattcgtttgctaggactgccatacaaggtaccacacactgggtggcttaaaaaacagaatgtattttctcagagttctggaggcataaaggccaggatcaaggtgccggggggttggttccctctgaggacctctctccttggcttgtctacagccgccttctccctatgtcttcacaggatcttccctctgtgtgtctcttcttataacgaggccagtcagactggatcaggacccaccccagtgacctcatttaactttaattacctctttaaagaccctatctctaaatacagtgacacggaggtaatggaggtaggacttcaacatactaatttggggctggttgtggtggctcatgcctataatcccagcagatgacttgagctttgagaccagcctgggcaacatggggaaggcccatctctactaaaaatacaaaaattacctggcatggtggcgcacacccacagtccagctactcaggagcttgaggtaggaggatggcttgagcctgggatgtggaggtcaaagccccaggagcagaggtcacagtgaaccaaaattgtgccactgcattccagctgggcaacagagccagacttcgtctcaagaaaaatttaaaaatcaaatagacatgatttttttttagacagagtctcattctgtt

SEQ ID NO: 95552 - DNA, 20269 bp, Homo sapiens
  misc_feature (1)...(20269): n = A,T,C or G
cctgtaatcccagctactggggaggctgaggcaggagaattgcttgaacctgggaggcagaggttgcagtgagctgagatcttgccattgcactccagcctgggcaacagagcgcgagactctgtctcaaaaaataaaaataaataaataaataaataaataaataaatataggtggcatcataatgatcttttcgcaaatatttttcccacacagtgctgtgaactgcttgagagtaggaactgcctttattaactttgtatctctggtacttactatttagtagtttcctcagtaaacaattgtgtgttttgtttgtttttgagatggagtgttactctgttgcccaggctggagtgcagtggtgtaatttcagctcactgcaacctctgcctcccaggttcaagtagctgggactacagaatcccgtcaccatgcccagctaatttttgtatttttagtagagatggggtttcaccacgttggccggactggtctcaaattcctgacctcaggtgatccaccagccttggcctcccaaagtgctgggattacaggcatgagcctacgcacctggctaataaacaatggttaaatggaatttataaattaataaaacatggccatatcttacatacccttcgttattggttccatttagaagttgattcctaatgacacaataggaggcatctttttttaaaaaaagttgttttattttaaaagataggggtcttgctatgttgccctggctggtgtgaaactcctggcctcaagtaatcctcccaactcagcctcccaaagtgctgggattacaggggtgggcctccacacccagtcattatgaggcatcttaatctcattagcctgtctccaaatcccatctcaaactgagaatgtttcctaaacaaagttaatccctttaaaaatgttgtttgggggctgggcgccgtagctcacgcctgtaatcccagcactttgggagtccgaggcgggcagatcacctgaagtcgggagtttgaaagcagcctgaccagcatggagaaaccccgtctctactaaaaatacaaaattagctgggcatggtggtgcatgcctgtaatcccagctactaggcaggctgaggcaggacagtcacttgaacccgggaggctgaggttgccgtgagccgagatcgtgccattgcactccagcctgggcgacaagagtgaaagtccatctcaaaaaaaaaaaaaaaatgttgtttgggtttctattagcttcagccctgtagcatcacatttttgcatatagtttactttagggagcttctatccattaattctagtagctactgtgaaggccaacggaaagctccctatcctttgaaggttcactgaaaagtcaactcacaactcacaaaaggcaggttaattggggcatgcaagttgtattaattcacacctggggagaatcacagatggggttagccgccctgcaaggaggttctgaagattatatgccaccctggcaacataggttatgggaggagagaggagaagaggaattctgttgaggggtttactagggggaatgaatggatcagggaacagagattaatttgagcattatcttgtgaacatgtctgtccaggtgtggttacactcttggtcttcagggaggggaagaaaaaacaattgttcttggtgggtctggatttttggcagataatagaaattaagcttcagagacagtgggtgggagggttagaacttgaggcttcttcagtaggtcaaggtgtcatttttggaacatcagctactgacccccaacaccaccaacaagctgtatttccacgattccagcacagtagtccccccttattctatttcacttaccatggtttcagttatctgcagtcaacaatggtccaacaatatttgcgttttgagagaagagagagagagaccacatacacacaactttaactacaatatactgttacaatggttttattagttgttgttaatctcttgctgtgcataatttgcaaaactttatgacaagtatgtgtgtgtgtcaggctgttcttgcattgctataaagaaataccagagactgggtcatttgtaaagaaaagaggtttaattggctcgtggttctgcaggttgtacaaggatggagcccgcatctgctcagcttctgaggaggtcttagggagcttttacttatggcattctaacatggcgagaacaggagcttgcacatcacttggcaaaagcaggagtgagtgagacagagaggtagagaggtggggtaggtgccctgcactttttaacaaccagatccaatgagaactcactctttattgagaggacagcgccaagccatcaaggattcacccccctgacccaaacatctcccatcaggccccaacttcaatgctggggattgcaattcaacaagaatttggcagaaacatgtgttcaaactatatcagtatgtgtaggaaaaaatcagtatacgtagggtttggtactacctgctgttccaggtatccaactgggcatcttgcaatgtacccccatggataagggggacttctgacttagacgaccttcccagggacagtgaggtagctgttcattcgggaaatattcacagcaagtctactgaggactaaactctgattttttatcttgcccaaattcctatctaaggggactggggagtcatgccctacaaatccagttctcatcagatgggctttatttaactgtatatatcatgatttactttccaacctgactctggcatcacattatgagacaaggaagaaaaacaaagtattttaccccaaaaacatgtttctttgccattattttgaaatggccctgcaaagctgtccttcatgggggaaaatttacatctgtaaagactctctgttaacatagctggatctttttcttccagaccctcccaatcttaaagtgattaagagtctagaaccttttaaagatacgaataggaaatatttttctattgtctctaatggcagccactataagatttcaaaagaaccttggtcttcacaatcttttatcttaacctgaacattccctttctgtggatcccaggtctttagacaaactcaaccaattgtcaaccagaaaatattttaattcacctatagcctggaaatacccccctaccatcccccaccccctttgagttgtcccgtctttctggaccaaaccaattatttcttaaatgtatttgattgatgtctcatgcctctctaaaatgtataaaatcaagctgtgccccaaccaccttgggtacatgttctctggacctcctgagggctgtgtcacgggccatggttgctcatatttggctcagaataaatctcttcaaatattttacagagtttgactctttgcttcgacactaccgtctgcaagttcttgtgctagccgctgtgggaaagacacagctgagtcagacatgatccctgccctcaaggagcttgtgacaccacagtgaagacaagtctattttggtgagtttgtggagacaggagatagaacaagcatggccgtggctgccctttgcttccgtggtgctgagcagcagcaggggcagctgtgagcaggcagctggtcttggcaggaagcagagcaccacccaaagactggagtgaggaaataaggccgcctttacaatttggcaaatgactggccttgggaatgtgagtagagagagagtagcaaattaagattatctcacctgagaagattcagaagtttcctctgcattttgtgaataagcagtgtgggcctgcctgcctgcctgcctgcctgcctgcctgcctgcctgcctgcctgcctgcctgccttccttccttccgtccttctgtccttccttccttacttccctacctccctccctccttccttcactcattccttccttcctgtgaataagcagtgtggggcttgcttgcttgctttgagtaagtagtgtgggctgtctttctttcgttctttctctttctttttctctgtctctctccctcctccctccctcctccctcactcctccctccctccttcattccctccatccatccctccctccttccttccctccctccttccttccctccctccttccttctctccctccctccttccgtccctccttccttccctccttccttccctccttccttccctccttccttccctccctccttccctccctccttccctccctccttccttccctccctccatccctccctccttccctctctccatccctccctccttccttccttccctccctctttccttccctccttccctctttccctccttccttccttccctctctccctccttctttccttccctctctccctccttccctccttacctccctccttccttcctttcctcctttcttttcttccttttctcttcttctctttctctgggcccctccgtccgggggggggggtgcggggggggggggggggtggggggggggggggcttcggggggggggggtaagttgggggggttcaagacnnnnnnnnnnnnnnnnnnnnnnnnnnnnnnnnnnnnnnnnnnnnnnnnnnnnnnnnnnnnnnnnnnnnnnnnnnnnnnnnnnnnnnnnnnnnnnnnnnnnnnnnnnnnnnnnnnnnnnnnnnnnnnnnnnnnnnnnnnnnnnnnnnnnnnnnnnnnnnnnnnnnnnnnnnnnnnnnnnnnnnnnnnnnnnnnnnnnnnnnnnnnnnnnnnnnnnnnnnnnnnnnnnnnnnnnnnnnnnnnnnnnnnnnnnnnnnnnnnnnnnnnnnnnnnnnnnnnnnnnnnnnnnnnnnnnnnnnnnnnnnnnnnnnnnnnnnnnnnnnnnnnnnnnnnnnnnnnnnnnnnnnnnnnnnnnnnnnnnnnnnnnnnnnnnnnnnnnnnnnnnnnnnnnnnnnnnnnnnnnnnnnnnnnnnnnnnnnnnnnnnnnnnnnnnnnnnnnnnnnnnnnnnnnnnnnnnnnnnnnnnnnnnnnnnnnnnnnnnnnnnnnnnnnnnnnnnnnnnnnnnnnnnnnnnnnnnnnnnnnnnnnnnnnnnnnnnnnnnnnnnnnnnnnnnnnnnnnnnnnnnnnnnnnnnnnnnnnnnnnnnnnnnnnnnnnnnnnnnnnnnnnnnnnnnnnnnnnnnnnnnnnnnnnnnnnnnnnnnnnnnnnnnnnnnnnnnnnnnnnnnnnnnnnnnnnnnnnnnnnnnnnnnnnnnnnnnnnnnnnnnnnnnnnnnnnnnnnnnnnnnnnnnnnnnnnnnnnnnnnnnnnnnnnnnnnnnnnnnnnnnnnnnnnnnnnnnnnnnnnnnnnnnnnnnnnnnnnnnnnnnnnnnnnnnnnnnnnnnnnnnnnnnnnnnnnnnnnnnnnnnnnnnnnnnnnnnnnnnnnnnnnnnnnnnnnnnnnnnnnnnnnnnnnnnnnnnnnnnnnnnnnnnnnnnnnnnnnnnnnnnnnnnnnnnnnnnnnnnnnnnnnnnnnnnnnnnnnnnnnnnnnnnnnnnnnnnnnnnnnnnnnnnnnnnnnnnnnnnnnnnnnnnnnnnnnnnnnnnnnnnnnnnnnnnnnnnnnnnnnnnnnnnnnnnnnnnnnnnnnnnnnnnnnnnnnnnnnnnnnnnnnnnnnnnnnnnnnnnnnnnnnnnacctacaggctgtccctgtctttcagcaaattgcatccagtctgagcttcactttgcaaccctgattagaaaccagtttgatcacactgggtctttcaaccgtttgtctgtggctagagttcataacttcatctttgttaagagcccactacctagaacatttatttaatgttagagctcaaaacaccctacctcccctctcctcatcttctttagtgccttcagtctttttcaaaccctagctccagcctaataagtaacacattaactgggttttcctatttatctatcctctcgcattacttctctgagtcagagcctcttctctctaagtcacgggaactgcccttgctacttgtgacctgccctttactcagcagtttttgttctgggaagccctgggattctgctaatacctatcactgtaggtgctgaagggaaacagatgaagaacatgacctcaaggagcttcctgtcaatgagaagaccaagctgacgcctggcaaaggtaaatgccaccataacaaattaagtaaaagtgtgcattagctaatttgtaaattcagcttaagatgaatcctgcttcttgggcccttctctgacgctggtgttgggactgtaggattcctcgagcctccgtcaaggttaacatcaaatcccactggcttctctcagcaccaccttgatgaccctagcttagtttctctgtttcccatgactggaactcttagacctttccacaaacatacaaggatttataattcaaagctcaagcgatgaagttgaagcttttggcccataggaagcctgaactagtgattaggagaaaaagattgaggagtctgagtgggaagagttagctatttgaaagacagcattatagtagtagtcattgtaggaaaactcaggactgggttggacttacttatattatgttgctttatattttggttactgagggaggtgaaggtcatcctttcagttcttgggatgtctaaatagcttcatgactcctgggctgttggataaatttgctttcagcatcatctggctgtaccttttgtccttagcaggggtaaaaggaaccctgtgaaaagcatcataccccaggtttcagtttttgccttgaaatgtgcccgggatcccaggcagtctgggactgcgccctttctccctcttgccaagtgtcctgtatgttcttcagggctagcatggaattaaggtgaggaagctgctggccatctttctgaatgcttgcctgatctctgcaggttgcctcacccccgatcttcctgtgcccttccgcagccattctgtcccctctcctgtacctccctggggtcagttgcagctcatccctggtcttattctgcctgaggtgctgagggtgacaacttacaatagagtctctccacagaacacagagatggagggcaattcttagtcctttccctcactacatcataaacattaacacttctgcttggtccagagttcaggaatgctacttgtaaccaccttgagttattttgtcagtaaaataggtctttgtgggctagcactggatctatttcatgataaccttcactgaggggctgtaagtaccaggctatatttgcctggtccttcatatgtatcttgtttaatcttctcaatagtagtagaaaacaaatattagcattagcttctattatgcaaaagaattcactaaaatacagactgatgaatgaatttgttgcagatcattcagcttgaatgtggcagagccaggattcagacctagcttttttgggctgagtcccacgctgggctttattactaggtacttgacgttactataatgtagaccatctcaacaaaatagagccacgatttcttaatgtgttattaacaaatacttaacacataaccaacttactttggttaccttaaaaataaaatatttggctgggcatggtggctcatacctgtaatcctagcattttgggaggctgaggcggggagattgcttgagctcctgagttcaagaccagccaggggaacagcaaactccatctctacaataaataaataaataaataaataaataaataaataaataaataaaaataaaaataaatcagctgagtgtaatctcagctactcaggaggctgaggtaggaggatcgcttgagcccaggaggcagaggttgcagtgagctgagatggcgccactgcactccaatctgggctgtacagccagaccttgtctcaaatgacaacaacaaaaatattcaggcccggcacagtggctcacatttttaatcccagcactttggaagcccaggagcttgagaccagcctgggcaacacagtgaaaccgcatctctacaaaaaaaatacaaataataaaaattagctgggcatggtggcttgtgcctgtagtcccagctacttgggaagctaaggtggaagkatggcttgaacccaggagttcgaggctgcagtgagctatgatctgccactgcactccagcctgggtgacagcgagaccctgtctctgaaaaacacatacacaaacaaaagccctcaactattcaaggtgttgtctcttactgagggaatctataatgcagtttttatgggaatgaaggtgagacttgaggggggcaccaaagaaaagtaagatactaataaagtggaggagtttttctagattagaatactgaagcaagtgcttatcccataatcattcttgtcccagagattttatactcaacaatggaaagtcactgagaatcccagtaccgcagaaaacagcctgtggagcagggcccacgtaggggtgcagatgaccctgttaccagaaaggggtcccgatccagaccccaacagagggttcttggatcttgcgcaagaaagaattcagggcgagtccgtaaagtgaaagcaagttcattaagaaagtaaaggaataagagaatagctactccatagacatagcagccctgaggggactactggttgcccattttaatggttatttcttgatgatacgctaaacaaggggtgggttattcatgcctcccccttttagatcaaatagggtatcttcctgttgttgccatggtatttgtaaattgtcatggcactgggggcagtgtagcagtgaggaggacaggaggtcactctcgtcaccatcttggttttggtgggttttagctggcttctttactacaatctgttttatcagcaagattgttatgacctgtatcttgggcctatctcctctatctcatcctgtgatttagaatgccttaaccatctgctaatgcagcccagtaggtctcagcctcattttacccagcccttattcaagatggagttgctctggttcaagcacctctgacaaccctacatgactttcttgtctttgctgtggcttcatctaagtcagaggccggtgggcagaggaccaaaaaataaaatacctaaattctctgcgctgaaaatcttggaggtgtgtgcatgtaaacaatttgtgcaccaagaaggcaactctgactcatctccattattgcctcattatcttcaggagaaatccacccttctcaactctactttgtaatgctggaggttattcatgcctcttgcaaaccacgtttctgcttaaactctgccaataaagggcactggagggagacagccggctggaggagggacttcctgtttgcttcctatctgcttcctggttctgtgagcatcaccatgtcaacgcctatttatgtctcagtggctgttcctttgtgtagctgcactaaattcagtttacagtagctatcggcaaagatttcatttgcctcctgagaggtctggatctcagcccagagggccctcctgtgagctcagagacctcagcatttgttgagtggtcmccactcttcagagccatgagtttcagcttcttcggtgtctctccacccaaaatttcaatttaataattttcagttcctcccttaattccctcaatctaggagtggtagctatgtccaacaattgctagtgccttaatagtgactccttccccaacactttatatcttaactttatacctagttgagttctttatattaaatttgccctgttcaggctgggcgtggtggctcactcctgtaatcccagcactttgggaggccgaggtgggaggatcacttgagcccaggaatttgagatgagcgtgggcaacatagcaagacctcatctctactttaaaaaaaaaaaaaaaattatctccgcatggtggtgtgtgcctgtggtcccagctactcaggatgctggggcaggaggatggcttgagcccaggaggacaaggctgcattgagccgtaatcacaccactgcactccagcctgggcgacagagccagatactttgtaaaaacaacaaaaaacttgctctgttcagatatttggttaggagtgttgctttttaggaggagcagttgggggccgggttggggagaagctaacaatgtcagcagctttgaagaaggcattttgtaatctataccatggccaaaaccaccccatggggctctcactgaagtccaacagcccatagtgtaatccattccttagactgccaacagctctagactcatagacattagtgagggagctctacaaactggaaccctgtgggtatttctacaacttacagattattaatagtcgtgcaaagacaggcaaatggatgttttctggtggggtaccgggagggagcagttgcatttgaagaatgaactatggatttcattgatgtgctttttttaaagaaaagtaawataacaaaagaaaaatccttgaagagtatttttattcccacctcttgtaatgttcagggaacatgagtgacatttggactcccaaacaaaagaagggaggggcatatctctctgtttctatggttcctcgttgagggaaaaaggctttcaagttcttgcgtgagcactgacaggcttttatgaatagttggtgacacaggtacaaactgggctgttctggctgaaatatctgtttgccttgtcggatattgccagcattcttcctgcctcactgacctccctgaatgacttgggcttgagaatgtttctgcatgatttctctgagcttgctgtcttacctgagagcaggaagtcaaaaggagagtgatggagccacctgctgccctctactttgcagatattaaagaggagcctgaaactgttccttggacatcttatgaatgtcagaaaataccttttggagggttagaagatcaggggacatggttgttcacatttgctgccacggaacaccgccagtcttcacttggaaacagaatcacgccttgtgaagagatcatccctaagcaggagagaagctactaaaggtgagaattttcttcatttttcattttccttcctcttagattcccataaaagctattactaaagagaatacattcttgtgtttaggaagagctacaacaagggaaaataatcattgcttgaaggatgtggcacattttgtccctctccttatagggattattttctataatatctggttttctttactgatattcagtaccctttattgtatttattttttcttttttttccatattcatcttaggatttcaatgtacaatgttttttctttatttttcttttgttttctttctttctttttttttttttaaaggggcttcctggtcttcatcggacagtgaaatttgtttgggagtccaaacaaaatataaaagagctataatacttcctgtattgtatttcaaaggtagctgtggtttgttggaacaagcattaggcttgtagacaaaaacactgggggagaagagagagtggagaggagtcctggatttgcttcttaaaacatgtgtatttggcaagttatttagcttctgttttcctatctataaaagaggcttaataatacatttcagattggttgtgaaggttattaaatgggacagtgtaaataaatatttctcacccacaaaaggtactcattaaatattgtatatacacagcttgkgtgcaagtatattttaaacttggatggatactctgaatgatttcaatgcatttttggataatatccagttatttttacttctttaagaacattttttaaaaagtgtggctagatgtcacatctgaccaatgaattatatatggtgaaaagcattctaatgctatataaattgccaaaatagaagcaagaaatgttttgaaaggacctttaggtttctagaaccgatgccaagagtctgaattttatggatttttctctccagatctatcagaaattccagaccccagataagagttatattctagggtggtaaggcatgagaagaagaatgaggaatgaagggtgggtggggacrtgctcttactaatgacgctccatggcagcaggtgctcagttgttccttttctcctggggtggaggtggatccagatccagacttgagtgtggtcggctagtttgtagggtcagattacagatctccatcaacaaaccagatgtaaggggcttctaggcaggtctttactaaggatttttgtccaggtaagaaatattttttgccatcagtttggaattgaacttgatgtttctgggaatgattggtttgtaactggaggcattttgttctgtccaaggattgtgtcctcctccaccttccctgtgctcggtctccacctgtctcccattctgtgacgatggttcaatggaagagactctgccagctgcattacttgtgggctctgggctgctatatgctgctggccactgtggctctgaaactttctttcaggttgaagtgtgactctgaccacttgggtctggagtccagggaatctcaaagccagtactgtaggaatatcttgtataatttcctgaaacttccagcaaagaggtctatcaactgttcaggggtcacccgaggggaccaagaggcagtgcttcaggctattctgaataacctggaggtcaagaagaagcgagagcctttcacagacacccactacctctccctcaccagagactgtgagcacttcaaggctgaaaggaagttcatacagttcccactgagcaaagaagaggtggagttccctattgcatactctatggtgattcatgagaagattgaaaactttgaaaggctactgcgagctgtgtatgcccctcagaacatatactgtgtccatgtggatgagaagtccccagaaactttcaaagaggcggtcaaagcaattatttcttgcttcccaaatgtcttcrtagccagtaagctggttcgggtggtttatgcctcctggtccagggtgcaagctgacctcaactgcatggaagacttgctccagagctcagtgccgtggaaatacttcctgaatacatgtgggacggactttcctataaagagcaatgcagagatggtccaggctctcaagatgttgaatgggaggaatagcatggagtcagargtacctcctaagcacaaagaaacccgctggaaatatcactttgaggtagtgagagacacattacacctaaccaacaagaagaaggatcctcccccttataatttaactatgtttacagggaatgcgtacattgtggcttcccgagatttygtccaacatgttttgaagaaccctaaatcccaacaactgattgaatgggtaaaagacacttatagcccwgatgaacacctctgggccacccttcagcgtgcacggtggatgcctggctctgttcccaaccaccccaagtacgacatctcagacatgacttctattgccaggctggtcaagtggcagggtcatgagggagacatcgataagggtgctccttatgctccctgctctggaatccaccagcgggctatctgcrtttatggggctggggacttgaattggatgcttcaaaaccatcacctgttggccaacaagtttgacccaaaggtagatgataatgctcttcagtgcttagaagaatacctacgttataaggccatctatgggactgaactttgagacacactatgagagcgttgctacctgtggggcaagagcatgtacaaacatgctcagaacttgctgggacagtgtgggtgggagaccagggctttgcaattcgtggcatcctttaggataagagggctgctattagaktgtgggtaagtagatcttttgccttgcaaattgctgcctgggtgaatgctgcttgttctctcacccctaaccctagtmgttcctccactaactttctcactaagtgagaatgagaactgctgtgatagggagagtgaaggagggatatgtggtagagcacttgatttcagttgaatgcctgctggtagcttttccattctgtggagctgccgttcctaataattccaggtttggtagcgtggaggagaactttgatggaaagagaaccttcccttctgtactgttaacttaaaaataaatagctcctgattcaaagtattacctctactttttgcctagtatgccagaaataatataaatataaacagataaagtgtgtgagactttttctcataactattcatgacatttaaaatccctaggggctggcaagagagttctcattattctgaaatggtcctgacaagctgcatgaatagcaattttttttttgagacagagtcttgctctgtcacccaggctggactgcagtagtgcaatctcagttcactgcaacctccgcctcccaggttcaagcgatactcccacctcagcctcctgagtagctgggactacaggcatgcagcaccatgtctggctaatttttgtatttttagtagaggccgggtttcaccatattcgccaggctggtcttgaactcctgaccttgtgatctgcccgcctcggccttccaaaatgctgggattacaggtgggaactactgcgcctggcctacaaatagcaaattctaacgaagacaggggaacagggatggttcttccattgttaaaagccatcctcattttgtttatattgccaggtttgtgatttttctgtaaaggaaaaggcagggtgatttaaccagtttgaccacctttcctgtactcttacaggaaaatcgcagcactaattctaattttgtccactttacagccaaagcttagctaatgttccataaaggagataatagccaatcaggtaaggtaatgtgtaattcattattcaaagtggaacatgtttttgtagggggagagtctgcactattaataattgtattgagaaataaaaataaactaggactattcagttaaaccaggatgtcttattattccatgtttaggcctcttgagtcaaaactctttttttttttttttttttttttttttttggagacaggttctcactctgttgcccaggctggagtgcagtggcatgatcttggctcactgaagcctctgcctcccaggttcaagtgattctccccccaaaccttgcaagtagctgggattacagatgtgagccaccatgcccagctgatttttgtgtatttttagtaaagatggggtttcaccatgttggccaggttggtctcaaactcctggcctcaagtgatccacctgccccagcctcccaaagtgctgggattacaggtgtgagccaccatgcctggtcccctcttgagtcaaaactcttatttcagaatgcgaatggaaggatcgctattagtgattctgcagattacacatttccttgcggggagacaataaggtatgtgtaaatacatatatgtgtgtgtatgtatacacacatacagcacgctacctcccaagtgttacctagtgaaacagtttcctttccgaagctccagagatggttgttggctaagttatactcttctgtgatgggcaagggatactataaaaacataggcagtgccctttgaatatagtacagctcatcttctgcatacgatatgccctggaaaggtgatttatatgcaagttaattggtgtaatctgaaggatgctcccattaatacgtcatgatgtcattaatatgtttcttcctttctgattttttttttttttttttttttttttttgagacagagtctcactctgtcacccaggttggagtgcaacgaatggcgcaatcttggctcattacaacctccgcctcctgggtccaagcgattctcctgcctcagcctcctgagtaactgggattacaggtgtgtgccaccttgcctggctaatttttttgtatttttttagtagaaacagggtttcaccatgttggtcaggctggtctgaactcctgacctcaagtgatccacttgccttggcttcccaaagtgctgggattacaggcgtgagctaccgcacccagccctttctgagtgttgtcattcaattcatcaagttttctgtcatgatcaactttctctatgcaaaccctgtaactctgacagttatcactgtgtctgacacagtgaattttttatttataaggtagttacttttggccaggtgtggtggctgacgcctgtaatcccagcactttgggaggccaaggtaggcagatcacttgaggtcaggagttcaagaccagcctggccaacatggtgaatccccatctctactaaaaatataaaaattagccagacatggtggtgggtacctgtaatcccagctacttgggaggctgaggcaggagaatcgcttgaacatgggaggcagaggttgcagtgagctgagatcgtaccactgcactccagcctgggcgatagagccagactgagtctcaaaaaaaaaaaaaagttacctttttttggtaaggttgtacttcttagataatggtcattgtcactaccaacttgcctgcattgtaatagagtcctattcactttgctcccaaccccactacggagatgactgatgactagttgtatacacagtgggtgtgccctgagaggtctgttgccagcagtggtgatcgatcacggcctccccctgctggctgatgtgatggtccttggtcctcctctgaaggaggtagaaggggcacacggccaccgtgggaagtaggcagaaaagcctccctgggtgcagattctctgagaaaagaactttggcctcatagttaacttactccaaaagctttcgtgtgaaataatttataattttttatataaataaaaagattaaaatgtgaacttgtcatttttttggggataagttactgaaatttttcaaccattgaaattttctctagaaatatattcaggtgcgtaggaagtgctgtttatttaataacacagggtcttcatatcagaggggtcgaatttagccctcatttgtttagtgtattatagaaatcatacaccaacacatctgctgatttttctcttccctctgagtcatatctgtgtctttaaccgttctctggtaaggaaaaatctcacaaattaattgaacaactgtgtttgtattacctctcagggtttggatttcctccttattttttatctgtgggctattggtaagcattgttttaataactgcatttttgttgtacactctgctcattgtagtttttgtctttctcttggttgagtggaaaaaatgtttttttttttttttttggaaacgggggactcactctgttgcccgggctggagtgcagtgctgcagtgatggctcaccacagcctcgacctcctgggctcaagcaatccttccacctcggccacctgagtagctggaactgcaggcgtgctcagggagtctgaggctgcagtgaactatgatcattgtgccactgcattccagcttcagtgacagagtgagaccctgtctcaaaaagcaaaaacaaaaaacccacaaaagcgttgacagggaatccctcaataaaaaggtgatgttcaagtaaaggtctgaaagaaggccaggcacagtggctcatacctgtaatgccagcactttgggaggccgaggcgggaggattgcctgaacccaggtcaacctcctgggctctagcgatcctcctgcctcagcctcctgagtagctgggactacaggcatatgctaccatgcccagcttgaaaatttctcaagaaagaaggagaaggccgttgataaccttgcttgggaacatatgacatacatcagttgaggaggtcaaatactttgattaaaactggaaaaaacattggggctaggtgtggtggttcacacctgtaatcccagcacttcaggaggctgaggtgggaggattacttgagctcagaaatttgaggatgcagtgagccatgatcgtgctactgcactgcaaactggcatgasagcaagattctgactcttaaaaaaaaaaaaaaaaaagaataattaaataccctgcctgcttgtctgctttaagtaccttacttgagccaaagatcagtttttctatttttttaagattcttcttactttttaaagatgagatctcactacgttgcctagcctggttttgaactcatgggctcaagcaatcctctttcctcagcctcctgagtagctgggattacaggcaggtgccactgcacctgtccccaagaatctgatcttactgcttccatttagtcttttttttgagacaagttttgctcttcttgcccaggctggagtgcagtggcatggtcttggctcactgcaacctccacctctggggttcaagtgattctcctgtctcagtctcccaagtagctggggttacaggtgcccgccaccatgcccagctaatttttgtatttttagtatagacagggtttctccatcttggccaggctggtctcgaactcctgacctcaggccatccacccccttggcttcctaaagtgctgggattacaggtgtgagccaccacactgggcccatttaattttttattacaaagatgaataagatatggtttctgcctctatgaagcttgaatgtactggcaatcaatgagataacgtcttcatcccacaactattgtgctcttactgtttaccaggaattgttcttggcactggggatacatcagtcaaaacacagacaaaaattccaacacttgtgttgtttgcatactagtgggaaacagactgtaaattattataaggaaacaaatgatagagatcaaaggaagtgatggagaacttgggaggatggagtagaaagggaagatatttaaaattttaaatagggtggcctgggctgggtgtggaggctcacatctgtaatcccagcactttggaaggctgaggcaggaggaaagcttgagcctgtggagttagaggctgtagtgaactataatcattgtgccactgcattccagcttcagcgacagggtgagaccttgtctcaaaacaaaaaaacaaaacaaaaacacacaaaaccaaaaccaaaacacacacacacacacasacccacacacccacccatgggtggacaggaaatccctcgatgaaaaggtgatgttcaagtaatgatctgaaggaaggtcaggcatggtggctgacrcctgtaatcccagcacttcaggaagccaaggaggaaagattgcttgagcccaggtgttcgagaccagcctaggcaacatggcaaaacgctgtctctacaaaaaatagaaatattagccaggtgtggtgcacacctgtaattccagctacttggtagactgaggcaggaggattacttgggctcaggagttgaggatgcagtgagcaatgattgtaccactcagtatacttcagcctgggtgacacagcaagaccccatctcaaggaaaaataaaaacatctgaggagacgaggaaatgatccatgaggattaagggggaagatcacattctagaggaaagacttgcaaggccctgaagcaggaacccacctgtcatgtttcaggaacagcgaggaagctattgtaagtggattaaaggaggagaagaagaggagttaagaggggcatacagaggaggccagtagaggcttttttaagctattgtatggagtttgtcttctcctttgagtgaaataggccattgtaggggtttctgagcagagaactcacattttaataggatgactctagcctgctgcattgagaacagactggcttgggggcgagggtagagcagggaggccagttaggagactatagcaataatccaggcactatgcaatagtggcttgaaccaaagccgtagtagtagaagtggtgaaagtggccagattctggaatttttttttttttttgtacaggctagagtgcagtggcatgatctcagctcaccacagcctcgacctcctgggctcaagtgatcctcctgyctcagccccccaagtggctcggactacaggtgcatgccaccatgtccagctaactttggtatgttttgtaaagatggggtttcaccatgttgcccaggctggccttgaactcctgagataggaggcgatccccccatctcagcctcctaaagtgccgggattacagacgtgagccatcgcatccagcctggaagtatt

SEQ ID NO: 95553 - DNA, 22319 bp, Homo sapiens
  misc_feature (1)...(22319): n = A,T,C or G
gaaagctgttcctgttgtttcctttcattggccacctgagtgtcaaggggccggggctgggggaacactttaaaaggccagtctcaagagagatgaatacagcctgtgtcagtgacaatgagtggtttggggacaaagccacgacagctctgagacatccgttagggaatcgtcccaggaaagtaaccaacccattgtcccatctcgttccagccaaaagccactcagaccttatcatcctcctcaagtcagtgcctcataggaccccagacccaagggtggagggagcttgggttctagagaaggaggcttgggctagaaagtcagcctgcctcttgcctggctgggctgcctggtgagtgactcagccctacttagcaagacaagaataccatctgcctcctggggttctgtcacattcaatgggatggatcaggcacactcatttgtctaagtcagcttggccagctgtaacaaatccatcataggctgggaggcttcaacaacagatattcatttctcacaggtctagaggctggaagaccaagatcaaggcgccagcagatttgatgtctggtgcatgccttcttccttatggacatgcattcttgccatatcctcgcatgagggaggaagcgctggtacttctttctctacttataaaagcactcatgagggccccaccctcgcaacctcacctaaatctaattacccctcgagggctccacctcctgataccatcacattggagattagggcttcagcaaatacatttgggggtgggggagaatgcgaacattcagtccataacagggttcattcagtatccattaagagccagtcctgtgcccggcactgaagttgcagggaggatagagcaaagcagccctgtcctcacagagtttagtctagtttggagctgaagaatgaacaagccattccagtaaagaaaagcgagagtcatgagggcacatgtaccgaggagaggccccagtgcggtcttgagggagccagagaaaacaggacctgtagttcattgaatggtgcccccaaaacacatccacctggaaccttacttggaaatagggtctttgatgatgtaagcaggtcatattggacaaaggcagactttaaatccaatgactggtgaccttagaagcagaagagagaacagagacagggaaggtcatgtgaaaatgaagtgagagactggagtgatggggccacaagccaaggaatgcctggagccaccagaagctgaagaggcaggaaggatcctccctcccctagagccttcagagcaagtgtggctctgccaacaccttgattttggacatctgcccttcaaaagagaataaacgtatgatggatgccccaggagactaacacagtagccgaaggacacgtggaatagccaggtcccatttggggaagaaggctcccagcagaggaaacagcatgggcagaacacagaaccctgctgcagctgcaagggtgtggtggctgggcaggagtgagggcaccgtgctgggctggaaagggaggaaagggcacatccttcagggctggcggaggccactgcattgtgtttggactttatcccagggtaatgggaagccacctgagtgactgaggtcccaggttcatggcaccacttgatataacacggttaagacatcactctgctattacggagaatggactaaaagcaggaaaggccaagacagggaaatgaatgcgatggcccagccccaagggcagggtgactttgttttacaaacgggccaaagacggtccttgtagactggccccaggtttacttcttcagagttggctagggccatccattctccaagacccccggtgccaaaatcaaaattttacacaacccattgttttaaatgtagcccaaagaagcagactcttagctatgtagagccygcctgctttatatatcctgagaaactgcacccagcatctgccagccacagattttttttttaaaaccttggactatagaagaccccaggcagctgctgtcccttggagccccctggcccagaggcacccaatggtcctgctgtgtgacctggacacttaagccccctctctagctctccttttccccaggagttccttcttccttcctggttggctggtggcccaggtgatggccacagtctctggaaggtctcctgctatgggagacgtcccccgcatgcaacctgtcaacatactgcccaagtaaaaaagctcactcttcctgatcaggcctgaaatcctcaaactcaccgcagcctctactgcagaaagggccaccaggatggagaggaaatgaagagattctggtaggacttggacatcaattagctatgatgggaggggagagggtgctgagagagggaagaaaagacaaagaggcattttgagcttagtcttgggcacaagggtggacccgtcactgggacaagggaggtgggtatttgggagaaggtgctgagctctgcttgggacgtatttagtttttgatatttgtgggcccccatgtagaaatgagttagatgctgatgctggagctcaggagagacctgtgagctagaaggagatttgggtgtcagcagaagagaggtggtgacagaagccattgggaaaagtggcccaaagagaaacatgcagagtgggaaaaagaggagggaaagagagccttggtggagagaggctttggtggagagaggttttggtggaaaggtctagcagggggcaagcctgcagagaaggctcagggggcatccagggagagagagagaagggaaagcaggtgcctgtgttgttagagaaggcagggagaccctgtgcctctgagctgcaaaaaagccaagcctggagaagtggcccctgcatgtggcaatagctttggcagcctcggtggacagtttcaatagtaacaaggtggcaagaagcacaatgagtgagcaggacaagaggaaggggtgcacggagaacaggcaactctttcaagaagtttgctgcaaagggagaatctgaataggacataggaaaacctccccttgggtctggtcccatccctgtcctggttgcaccaggccattcccttccttccgacctcccccggtgcagacagcagtggtgtccattctggatgctgcaccaaacatttcccgtagagtctggagctgaggcgagggcaccaaatcttcagctttattcaacaccccccagttcctaattcccacctccccccatcaaacagcattaagccgatgtttactatacaggttgccaggacaacggaatgtcagagctcatgtgctccattttgagctcatattgtcttcattggaaacaggtcaacaaggagggcaagtgrctttttcaaccaagtctggaatactgacggggcttgtccagcctgagaccagtcacttcggaacagagtaattctcctccccaaaagcaatcaatagatcacacaatgactcttctgaagctcaaaggcacggggacaggacaagtgctgagctcctcagagttcttttcttattaggcatttgttggtcgcctctccagtgtctacagtcttctctccctttgtggagaaccttgatttggtcataactgggcatgtgacctagtgccggccattaagggagagagagagactctgggtttgtgcagaggctccctggggtgtccccctctccctgtgaacagcgtggtaggaggctggaggcccaaaacccccaaatgtcactgcactacatggggagctcagagctgcagggccctggagtggggtcaacaccatgaaaagcaaaccaggaagtcaaagaaactcggtcctcacacagtccaagctcttgggtcaagctactacatctgatatgattgtatagccacagctcattccatgagacacaagagagaatccacagcatcccatgtgatcctatgacctgcagagaaagaagaactctcactagaagctagtaagccagagagctccacctgaaaagttggaaacaacaacaacgacaacaaaacaaagttcttagaaacagacacacacacacacacacacacacacacacacacacacacacacacacacagggtgggaggcagggaaagaatgcaagaggtgaacaccttcttaacataaaaatgagccaacttcagatcagaaaaatggaggccccatgtttccagagttctccgcaaaaatgtcaaatctctgatcaataactttcaaatgccacaatccgtgcgttcaaataattctttgaaggcttagtaaataaatatattgacaaacagattaattgctaatcacttctccgatattgtcattacttccaaacagttagatccaaaacaaggcagcttgcaccagaaagccttcccatttcccctgggcgctgctttgaaggtcctccgctcctgcctggtttgaggctgctgctcccatggccatgcattctaggggcatcaaacgctcctgttttgatgagaattcaaaaggtttcctgtcagctgggatgctgtgcttttttctgggttttgtgtgtttgcgtctttaccttacccatatgttctgggcctgtgaaaaatgtaagcaactggcagatgtgtcctgagaaatcgctggcatgacttattcaatttgcaaaaattgtaaacacaatggaactggtgcctcaggctacatctaccccttgttatcagctatctcagtggaaacaatgccagaagagctctctgttttgcgttgcaggcaggtaaccactgtctacaccaaggggcccagagcaggaactggcccaaaggagttttgtttgagccccgttgaagttggactgttttcccccaaaataagagattgccacgtccacagctcacctttcaagctgataagatccaaagaccagacttttggagtctagctaagatagctaagggaacacgatctcagttgtcactctagggcagtggtccccaacctttttggcaccagagaccagtttcatgaaaggcaagttttccatggatggtggagggcagggatggtttcaggatgaaactgtttcacgtcataaggggaacgcaacctaggtccctcgcatgcacagttcacaatagggtttgggctcctatgaggctctaatgctgccgctgatccgacaggaggcagagctcaggcagtaatgctcgctagcctgctgctgtgtggtccggttcctaacaggccacagaccagtaccagtccgtggcctaggggttggggaaccctgctctagggagtaaaattgataatttggcaaaatctatccaaaattagtctgcacataccttttgattaattcttcttctcagaacttatcctatgaatctacctgcacacgcgtgacgtgacacacctgcaaggttcttcgtggaggcagtaattctacttgcacctttctggtgcagaccaccttgttttggatctaactctttggaagtaatgacaacattggagaagtgattagcaattaatctgtttgtcaatatatttatttactagaccttcaaagaattattattcaaacgcacggattgtggcatttgaaagttattgaacagagatttgacattttgcagagaattctgcaaacatgaggcctccatttttctgatctgaagttgggtcatttttatgttaagaaggtgttcacctcttgcattctttccctgcccccgttgtgtgtgtgtatgtgtgtgtttctaaggaaatttcacggttggggggtttgtttccaactttttggtcggagctctctggcttattggcttctttctataatgctcacatgatttttctgggtgccaggccctgtggatgcctttatatacacgagctcctttcgtccttataactctatgaggtaggtaggcactaccattttcttcattaagaaacaaggagcccagtacggtggctcacgcctgtaatcctagcactttggaaggccaaggcaggcggaccacctgaggtcaggagttggagaccagcctgaccaacgtggcaaaaccctgtctctactgaaaatacagaaattagccaggcatcatggtgtgcacctgtaatcccagctactcaggaggctgaggcaggagaatcgcttgaaccccagaggcagaggttgcagtgagctgagattgtgccactgcactccagccttgggtgaccaagagagaccctgtctcaaaaaacaaacaaacaaacaaacaaagaagctgagaggcagaaagagggtagagaatttggccagtctttgttttttgtttgtttttgtttttgttttttgaggcagagtctcgctttgttgcccaggttggagggcaatgatgcaatctcagttcagtgtaacctccgcctcccgggttcaagcaattcttctgcctcagcctcccaaatagctgagactgcaggcgcctgccaccacgcccggctaatatttgtattttcagtagagacagggtttcaccattttggccaggctggtctcgaactcctgaactcaggtgatttgcccgccttggcctcccaaagtgctgggattacaggtgtgaagcagtgcacactggccagtcattttcgtagtggcaaaagactagaaccaagccagtgtccatcaatcaaggagtgacaacataagctataggccaggcacacgatggaatgtggaaggacagtgcttgaaaaattgcagctctttatgtcagagaaggttctccagacaaattgtgtgttaagtggaaaaaaacaaggtaccgaacagtactcatggtttgctactgtctatgaaggcaaagcaaactatacatagggaaacatatacagcatatatatatatawgcatagaaaagtacatttctatgattttctatgcatgaaatatctctgaacacattggggggaaatgctaatcatgttgactgcctgtgcaaaagaaaactggattgctgaggggtaagatggaatttttttaattataatcacttttatactttttgaaatttgaaccatatgaatgtattatgtctttgaatattttaacagttttgttcaggtatacttggcatccaataaaacgtacccaattaaagtgtatggtttgatgagtttagctacaaagttgtgcaaccattgccacaatttagttttagaatacttcctacaccccaaaagctccctgtgttcactgacaggtaatccctcttcccactcacagctctggcaactattaatcygcatttgtctctgcaggcttgaatgttctagatattcacatacatgtgtagacatatgtattagtctattctcatgctactaataaagacatatctgagactgggtaattaataaagaaaaagaggtttaatggactcacagttccacatggctggggaggcctcacaatcatggcggaaggtgaaggaggaacaaaggcacatcttacatggcggcaggcaagagagtgtgtgcaggggaactgccctttataaaaccatcagatcttgtgagatttattcactgtcacgagaacagcacaggaaaaacccagccccatgattcmattacctctcaccgggtccctcccacgacacgtggggattatgagagctataattcaagatgagatttgggtggggacacagacaaaccatatcaacacacagtatgaagacctttgtgcccgacttcttttatttcrcataataattaagtcacccatgttattatatttatcagtaggttgtgcctttttattccattgtatgggtgtcctaaagggtgttcatgcattcactagttgatggacatttaggttgtttccagtttggggcaatgacgaataaacatttataaacaggtctttttttttttaaagtagatatctagcagtggaattgctgggtcatatggtggtgtatcttaacttttaagcaaactgatgaaccaggtgagcttggtggctcacacctgtaatcccaacactttgagaggccaaggtgggtggatcacctgaggtcaggagtttcagactagcctgaccarcatagtgaaacactggctctactaaaaayacaaaaaattagccgggcatggtggtgcacactggaatcccagctacttgggaggctgaggcagaggaatcgcttgaacctgggaggtggaagttgcagtgagccgagattgctccactgaactccagcctgagcaacaggaacaaaactccgtaaagaaaaaaaaaaaaaaaagaatcattttcaaaagtgactacaccattttacattcccatcagcacatagaggattacagtttctccacatccttgcaaaaacttgatatcgccaggttttttattttagtcattccattggttgtgcagtggtatctcattatggtattaatttgacttttcctaatgactaacaatgttggggatattttctgtcttcaaaacacaaaatgtaaaagtttgactcagtaaacaaatcgaaattgagagatgtcacataacagttaggacctccggtttctctcccccaaagtcagaaaaatctaccacttctttggtctacattgcatgtatccagatccagcacctcttttccagaactctcagttcctaatttctctgatttagacaggcaagaccaatgcatacgctgaatctcagtagcaccttcagcggagcctggggcaggatctttgaatccacacaccagtggttccaagtcaaagacaagagccttcctcttaagtggaacaaataaagttataaaygagctcaggtgaggttctaccacccaatgagtctgctgaaaatttaccaaaaacattgtggttctcagaggtttgggaatctggaattgcaaatagagagataatgggtgcataacatctgctccttctggaagatgtsttgctttccatattccccacagtcccaatgtctaagaccagcctgaccccagtgcattttcccttgtccctatggtgcgtggtgtttcaggagcagactcatgattcatttaaatgcatttgtttccatttaagtcggccaaagactgaggtcgactcagctycccscttgtggagccgttcctgtacttaaacacaggaatggaarcaggcctgagttcttcatagagcaaacaaacctgtcccttctcctagccaagctcaccccagcaatgccaccaggaacccctaatgtcctctccagcgcaacaggccggttccacacgctaataaaagctgactgtttcaaagcctgttggcaaatcttattaaagtaatccccctccctgaacccagattattacagccaccgttatggtagaataaaaattaattttctcagctataataagagcgataagaatgaatcacttgggaccaaataaagattacaattagctccaacagaataagactaaatttaacgtaggccagcaatttatttgctcctattttctctctggtgcctgcatgaatgaggctgctggatcagacctcctcsccagctgggccattgttgatacagttacatgaggggctccagcaggacggtgaggctccaagccagcccccaaaaggccaaagctcagtgcaggacccagagacatcacaggagagtccaggcaagggaggccagtccttgtagaaaaggtgaattgtgctgccctagaccggtggctcccttttttttttttaggcagggtcttgctctattgcccaggccggcgtgcaatggcacaatcagggctcactgcagccctcracctcccaggtgcaagcaatcctcccacctcagcctcccaagtggctggaactatgggcacaaaccatcacacctggctaattttgtttactttttatagagacagggtctcactatattgcccaggctgatcttgaactcctgggctcaactgatcctcccacctcagcctcccacagggctgggattacaggtgtgagccactacasctggccagtggctcccttctgatcactggacctatgtgataattgaacccttcagtatccatccccctcctggtaactgcaccccagttttgagtcaacaagaaggaaggaagcccagcgcagscctgaggggaaccagagagtcagtgcccatctcagcaggatagggagggtagtctgaggtcaccatcagctgtggatgtgtgatggatcagagttagtctgcagccacatgaagggcagcagggtgtgtggccacagcagaagagaggcttccagtcagtgtggctcaaaaccmaccagtcctcctggggcttgaacacaaggcggcagcctcgttaatgtggaggcgttgggacccatactggaragccaagttctcgttacttctcccctcttcctctgcctgtccctctcactgtgtggatggaatgactgttcactatcatcatcaacagcatctactgtgtgttgtgcayagtacactgccaccrgctctgagctaaacacgctacacgtgccaccatctctgcaaatcctcccaccagccccgggagctgtagtcatggggactaaattcttcccattttacaattgaggaaactgacattcagagaggacacaactcttatccaaggttcaccaggacaaaaccaggacctgagccacctctacctgatgctcttaccactgggccacctgccctgaaacccaggattatatcatggcctctggggacaaccgggggaccccagtgggtcaataccagcaagagaggccaaggacatccagtccagcaacttccagactaattttttccttagctatacaaactgttattcaaacaacatatttttaattgattatgtaatatttttacaagaggatttttataatacagtgaacatacctggaccaaccatccaagttaagaaacaggtcactgcacatggaatcaacccaaatgcccatcaatggtagactggataaagaaaatgtggtacatacacaccatggaatattatgcagccattaaaaggaatgaaatgtcctttgcagggatatggatggagctggaagccattgtcctcagcaaactaacacaggaacagaaaaccaaacacttcatgttctcacttataagtgggagctgaatggtgagaacacatggacatggtgggtcagggacaacacacactggggcctgtcagggtgggggtgggaagggagagcatcgggaaaaatagctaatgcattctgggcttaatacctaggtgatgggctgacagatgcagcaaaccaccatcgcacacatttacctacgtaacaaatctgcacaccctgcacatgtaccccagaactaaaaataaaagttgaagaaaaataaattcattaaaagctctgtttgaaaaaaaaaaaagaaagaaagaaacaggtcactgcaaacacaggtgaagtcctccgtggtccctccccaaccacagttccctcctgaccccagaggtaacccctttcctcaacttggggttcaccatgttgtgagtttttttacttttattgtagtatatagtgcctacatatggtaagatatgttgtatcatttctagattttatataaatagcattgtactctatgattctacaacttgcattttccacccaacattatgtctacgaaaattacatttattgacatacatcgccgtaacccactcactttgctactatttggtatcccattgtatggaaataccatatggatccattctcctgctggaagtttaggtyggttccaagcttctgtgattacatacaatgttttaagaaacaattctcacacacgtcttcgtgtttatatttgcatttccacttacctaggagtggagtttctgagttgtttaaggggaaaaaacacccttacagagaaagatgatgaagagaaccactgagagctccccagatgaagcaaggagggcaggtctggggcccctcaaagtcacactggccaccccttctggcagccccagaatgtgaaggctccaggtgaaagcccagccctggaggtcacctgcccaaggtcaacaggcgggagactccactaagctgatgayggaggaggatagagatgatgaggggatatgaccccatggtgggaaggcagcactatcctttgatgatgtccccttcactcaagccaggacccctcgccaaaaccaaagcccaaagtcctgcccccagcccaggaaaaggcaaggacaaaagactgaaggggagcacccccacttcccagttctgcccgtcgggtgagagcagtggatccatgctccggatgcatggtgatctttaacaacagagactgatgggcaggggagactcagccttttacacagatgcacctgcagcaatgtgaagctgcaggtgaatttaaacaatcgtgcctaatagtcacacggtgcgcactccaggccaggtgcttccaatcgctttgagtataccaacccatgctaatcctctcaacaacccaggtactacaatcagctccatctgaggaggaaactgaggcacagagaggggaagtcacttgcccaaggtcaacaggcgggagtctctgccaggctgatgatggagaaggatcgggataacaagsggttctgtccccaagttgggaaggcggcactatcctttgatcgggagccccccattctgcttccagccctctcaccaccctgccaggaacaagaggtaggtgggttgtggtgggcaggcaaggagaggaggcttggccaaaggctgtggctgagaaagagatgtacttatttatcggggaccttaggcgagtcacatcaggcctccygccctgctcccaaacctcccatggctcccatytgactcagagtaaaagtccaagttctcatggtggcctgtagtacagtttgtgggatggtccttctcactgctctgtccccctcgcttacrtcactgcagccccccactttgtgtctagtggacatctggcaccgttctgccacaggacatttgcacttcctgccccctcttccggaatgagctgccccaggtctttatatagtcagtcccttcccactactcagacctcagctgaaaatcatctactcaggggggtccgtgggggacggtagaagcctggaggaggagcttgagtccrgccactgtctgggtactgccagccatcgggcccaggtctctggggttgtcttaccgcagtgagtaccacgcggtactacagagacyggctgcccgtgtgcctggcaggtggagccgcccgcatcagcggcctcggggaatggaagcggagaacgcgggcagctattcccttcagcaagctcaagctttttatacgtttccatttcaacaactgatggctgaagctcctaatatggcagttgtgaatgaacagcaaatgccagaagaagttccagccccagctcctgctcaggaaccagtgcaagaggctccaaaaggaagaaaaagaaaacccagaacaacagaaccaaaacaaccagtggaacccaaaaaacctgttgagtcaaaaaaatctggcaagtctgcaaaatcaaaagaaaaacaagaaaaaaattacagacacatttaaagtaaaaagaaaagtagaccgttttaatggtgtttcagaagctgaacttctgaccaagactctccccgatattttgaccttcaatctggacattgtcattattggcataaacccgggactaatggctgcttacaaagggcatcattaccctggacctggaaaccatttttggaagtgtttgtttatgtcagggctcagtgaagtccagctgaaccatatggatgatcacactctaccagggaagtatggtattggatttaccaacatggtggaaaggaccacgcccggcagcaaagatctctccagtaaagaatttcgtgaaggaggacgtattctagtacagaaattacagaaatatcagccacgaatagcagtgtttaatggaaaatgtatttatgaaatttttagtaaagaagtttttggagtaaaggttaagaacttggaatttgggcttcagccccataagattccagacacagaaactctctgctatgttatgccatcatccagtgcaagatgtgctcagtttcctcgagcccaagacaaagttcattactacataaaactgaaggacttaagagatcagttgaaaggcattgaacgaaatatggacgttcaagaggtgcaatatacatttgacctacagcttgcccaagaggatgcaaagaagatggctgttaaggaagaaaaatatgatccaggttatgaggcagcatatggtggtgcttacggagaaaatccatgcagcagtgaaccttgtggcttctcttcaaatgggctaattgagagcgtggagttaagaggagaatcagctttcagtggcattcctaatgggcagtggatgacccagtcatttacagaccaaattccttcctttagtaatcactgtggaacacaagaacaggaagaagaaagccatgcttaagaatggtgcttctcagctctgcttaaatgctgcagttttaatgcagttgtcaacaagtagaacctcagtttgctaactgaagtgttttattagtattttactctagtggtgtaattgtaatgtagaacagttgtgtggtagtgtgaaccgtatgaacctaagtagtttggaagaaaaagtagggtttttgtatactagcttttgtatttgaattaattatcattccagctttttatatactatatttcatttatgaagaaattgattttcttttgggagtcacttttaatctgtaatnnnnnnnnnnnnnnnnnnnnnnnnnnnnnnnnnnnnnnnnnnnnnnnnnnnnnnnnnnnnnnnnnnnnnnnnnnnnnnnnntataccattatcccttttatacctaagaagggcatgctaataattaccactgtcaaagaggcaaaggtgttgatttttgtatatgaagttaagcctcagtggagtctcatttgttagtttttagtggtaactaagggtaaactcagggttccctgagctatatgcacactcagacctctttgctttaccagtggtgtttgtgagttgctcagtagtaaaaactggcccttacctgacagagccctggctttgacctgctcagccctgtgtgttaatcctctagtagccagttaactactctggggtggcaggttccagagaatgcagtagaccttttgccactcatctgtgttttacttgagacatgtaaatatgatagggaaggaactgaatttctccattcatatttataaccattctagttttatcttccttggctttaagagtgtgccatggaaagtgataagaaatgaacttctaggctaagcaaaaagatgctggagatatttgatactctcatttaaactggtgctttatgtacatgagatgtactaaaataagtaatatagaatttttcttgctaggtaaatccagtaagccaataattttaaagattctttatctgcatcattgctgtttgttactataaattaaatgaacctcatggaaaggttgaggtgtatacctttgygattttctaatgagttttccatggtgctacaaataatccagactaccaggtctggtagatattaaagctgggtactaagaaatgttatttgcatcctctcagttactcctgaatattctgatttcatacgtacccagggagcatgctgttttgtcaatcaatataaaatatttatgaggtctcccccacccccaggaggttatatgattgctcttctctttataataagagaaacaaattcttattgtgaatcttaacatgctttttagctgtggctatgatggattttattttttcctaggtcaagctgtgtaaaagtcatttatgttatttaaatgatgtactgtactgctgtttacatggacgttttgtgcgggtgctttgaagtgccttgcatcagggattaggagcaattaaattattttttcacgggactgtgtaaagcatgtaactaggtattgctttggtatataactattgtagctttacaagagattgttttatttgaatggggaaaataccctttaaattatgacggacatccactagagatgggtttgaggattttccaagcgtgtaataatgatgtttttcctaacatgacagatgagtagtaaatgttgatatatcctgtaaaaaaaaaaaaaaaaaaaagaaaatcatctactcagtgctgccttctttgaccaccttctagaaaatagcttcatggaagccaggttaaaggtacataggacctctctgtactctttctgcagcttttctctacatttaaaattggttcaaaataaaacattttaaaaaggaaagaaaagaaccctttagcttgatgtattgaggaaaagcaaggttagaatgcctgacatagagaaagagaaagagtgcgaagagatgctgcttagaatcagggcaggggcaggccatgcagccactgctcccgccccccaccaggagcttggattttattctcaaaggggtctcaagccaggcagctctgaagcacatcagcaattgcccataggactgtcctgtagaggaggaattagatttatcctgtgtaatccctggaatccaggatggacttgatggggaggcagatatggatctgtgtagaaagaatgttccaacacctaaagacagaagaggaggtaatgagccctcttcctttgagctgggcaacttgaagctaagggagtgcttgttggagagaacattcagggaactcagtatccaggacaaactctgctactctaagaccacctgtgtccccagaaaagccagccaggtgagggggggatgctgatcttccatttccgcaacatccagggggtggtgacccagggtcccctgcttgttgtcctaagtacctccattacaaccacctccagagcatcctcagtctctggagccactgctgggcagacgtcaagggctgcaaactgctggtgtgcattacaacaattggccaagtagcaactgctatctttagatggggaatggggtctcctgttcactccaagtcccatcaccccttaaccaccaacaggcaagtgacacagaatctgaggctccaatcccagctctactgccttctagttgtgttaccttggccaagtgactccattgttctgtgcctcagtttcctcatctgtaaaacaaggatcatggtacccacggcatcggggctatcatgaggattgcttgagttaagatacatacaagcattcagagcagtggctggaaaataataatagtgttaacaattcctattattgaccaggcgtggtggttcacgcctttaatctcagcactttgggaggccgaggcaggcggatcacttgaggtcaggagttcgagaccagcttggccaacatggtgaaaccccgtctctactaaaaatacaaaaatcagccagacgtggtggtgggcgcctgtaatcccagctacttgggaggctgaggcaggagaatcacttgagcctgggagacggaggttgccgtgagctgagattgcaccactgcactccagcctgagtgacagagcgagaccctgtctcaaaacaaaacaaagaaacaatttctactgttatgcgccttcgcgtaggcacagcatcatcagctggatttgctgctgtgctgactccctaacccctaacctacttccttctgtgcataagctgcctggttcctggcattggttgagtttgcaagcccaggagggtgccttcttgagtctgtctagatcacataggaaagaaaaacccagagcagagcactaaataaacctggacagttaaccagccccaactctgcctgcaagtgtagacaggacagtgcccccagactcccctctccagctccaagtctcccatttctagcggcatctgcagacctcccacatggcagccagtgcccaccagaggcactttgcacaaagaagacatttctcagctaatytttattctaatttctgaaagaacagsccaggcaacctagatagtcattagcactgaagaaagaaacatctcatcccagctcctaacccctcagacttagctgaaaaatgacagcagcctctggcaacttcactcatttgagctggaagaaaagatctttgtgcctccctcgcgagggttcgtgacctcttgtgcggttcccagcttagagaatttgccccgttcaagccctgctggctcagtctcttccaggaagtagtagctgagcccctctgagcccgggtgcaggaagcgcctcctcaatgcagcacaagaaacccaggaagcccagcaccacctctggggcccacaggaacacttttcccctgttcctcgccttcaaggcagaaggcagcgttaccttgcaaaccaggcttctgagcaagaaggaaagaaagagcctcccatctgctgcctagagttggtaccgaatctcggcaaaacctccaattactctggaggagccatcgctgctgatctttgtcaaaatctccacattccaagaaggtgagccctcgttactgtttccagacgcccacacagaagtcaaggccggtttgcataggactggaggctgggacgtggcagcctgcacctcgaattggagcaagactttcacagaaacaaaacgtaatcaagtcccctgcacacactcagctaagctctctgcacacaggtatacatgagttcgcacgccgcccaggcaggtgctggatgacaagaacagagaccaaaaaagatgcactgatcctggggatgatgatttgagttcaatctgtatttgctgaaagcccatcatgtgccagaagacagagacacaaagagatgtcctgacagagaggacggctggccagacactttggcgacacacaggaccggctaggtcatatgcggggcccggtgcaaaatgaaaaggcagggagcctttggtcaaaaagtattaagaatttcaagagcatgacacaaagtttggggtccttctgagcatagcatcccctgcaactgctccagtcccatgtccgtgaagccagcctgggttgcatgtggcagaaaattaacccaaaccaatggagggagggggggaggggagggaaggggaggggagaggggtaaggggtgaaaggaaaggtgggggaggagaggggaggggaaaggagaggggagagggaaaggggaggggagggcaaaaggggaggggaggggaaaggagaggggagggggaaacgggaggggagggggaaatgggagggggtgggaaatgaaggaagggagagagaaagggaaggaggaagggaggaagggaaaaaaggaagagagaaagaagggaggaaggaagggaagaagaggagaggagagaggatggaaagaaggaataaaagagttaaagagcaaggaggcatcaagaaagaaaggaaaggaaaaggaaaagagaaatatgtgcatcatataactaaccatctaggaattgcgtctatctgactggacacagattcaaatcattctcaaaaccaaggtttactgacccttgctaggtgtcagccactgttctaagggatttacatgtattgactcacttactcatcatcacgagcccctgacctaggtatttctatgtccccatttttaagatgaggaaactgaggcacagaaaggttaggcagcttgccccaagattccagattcagtacgcagccaagccaggattcaaacccaggcactcgcactcccagctcacacgaggggtgtccaataaaaattatgcacacggtccacatcctgagcatgtgcaggcttccaggaaagcaggtgctttggtagacacatccagcaccagttgtctgtggaggcagaagggttaaaggaagagctctccattggtttagggtatattcattagggatggcccattctagacaccctcatccccatcctgtgtcctttcataactcctcaatagcacagaagacagcaggatggggaaatggccacagtatacagagcccactgtgccaactctgaattcacacctgaatcctgacagatttctgcaaggtgaaacctgtaggaacagctctcacggtgagtacattttagacatttctcagtgactgtccctgagtggaatgcaaccatccagatacattagctgtgccatccatcagcccagcaggctccagaagcagaggccaacttcctcagagatggtggcgctcagcctgggtctctccagaggacgctgggacatctacccaagggtcctcagagggccaccccagcaacagatcttttcattcttaatgtgaatttcttgctaacctttaaaaatggggagttcaagcccaggcatcttgaagaaacggctgagcccatgtccagagcaagacatgtaccagatgaatctggaggatcttgtgccaagaagtaggaaaatgcttttactgatggggatgcatcaaaaggacatgcgaggcagctggaaggagcgcctgctgggcaacgatgggatgatttagagcatccaaacaactaatgactcaatgggttgaaacccatcaaatatactaaaattcatgggctcacagtgatactaacaatggagcatatggagagtctatcgggctgaatttccagcttctcttgaaaaactggaagatctgacagcattagacctatactctcatatgatgacagttggctggagctgggagcagctgtcccttgtaggcagagcacaggctttccactttgccacagtccccaccactccctattactgcactggagagagcgtgctcattgtttgtatatgagcacctgcttcactcctttatgccatgtacttcctacttcagtctcaaatatccttctgatctggaacatctctcatctagcagttcctggaggtcagatctggcctagcttctctaggctgcttccaaaaggcccatgatcagaaggaaatatcatgctactgaaaaaagatggaccacattccccacccaacctccctgcccctgccacacatcctctggcctgcccgctgtctgccctgtttggttggggttctgtgcagaggcatagtgggctatgatttgcattttcaaaggctcattctggctcctcgatgagaatagactggaaagagataagcatgagagaagcaagatgctagaagcagcttccgcagattccaggaatgagatcatggggcttggatcagggtggaagagagaagatgggccagaaccctgggagttcaaagctagaggtggcgactcactgattgataggatgtgggatgtaaaaggaagagagaagctgggatgacgccagrgttttcaacctgagcaaactggaaggatggaattgccgtcagctgccacgtgtgttctgggaaagtatgactttcatgtctgtttaaattaattgaaatcccaattaactttgatttaaaatcaccattcccaagcagcagttgcctgcctcccctcataacccagaatcaaaatggcaccgctcttgtaacggtgacccggtttctctatgactaacaaacagggatgccaaacgggttgagtgccagtgagccaggagcatccgtaagaaagaatctccctttaaagggccactgctgcaggattcttctgcaaaccccagtacacacccaccttttgtcatgctcaattatgtctaagaagatgtgaacagtgtatcagcccatcttcctaaaatagcccagaagagcaagcaggaaatattccaccccaaaaggtctttcactgaagagttgggaagctccgggaacaggtgcatataattgaacagcctcggacaccagtactcagtgatgggccacttgatgtgacatcgtatttgatttctataattgctcagcctgtgccttgagtcaaggagacatcctaaaactgtttctcacatcgacacacccgttagcagatgaaagggaggtgccctcccaaagcctctaaatgtactgtgcctctcattgttcagtaagacccagaactaccgtgggggtgttgttgggggggaggtcaaagtgtttctctgcgtggctggctacggttgccatggtaaccagaggcctaccagaggaagcagccactgagagacagcccc

SEQ ID NO: 95554 - DNA, 162562 bp, Homo sapiens
ccttttcccctgttctacattacatctacatttcagattcaggaactcaaattttcattaaccaggatgaataattaaatatacccatttttttggagttaaatcttttaaaaatcggtttaatgatagcattgtaaaggacctcacagattcgctactccagtgttatcctttaggaggggaagaaaacaaggcccagggagttaaattgttcagggcttccacactagcacacaagtcaagcaagggaccaaaataccacagacataacttttagctccatcaattgatgggagagttgtgtgaaatttgatttatcatttaggacttgatatttacatttcaaaataaggtaacactttttgtttgtttgtttaagttttggtttatccttcctgttatctcaaaaacaagtggggaattagtaaaatatttacttaatttcttgaaagcagtctgtaggccagtcatgtaactatttgaaaaatggaaagggtaacttcttcgtgagactttgccgacaagaaagaacctaagtatcccttggtgtacaattccaatgaagaatatttatttcataaaccacatatgggtaaacatatttctggagtaaaatgttgaaaaaaatttgtttaaatcataaaccacatatatactactactcatcttgaaaatgcaggcttctttttaaataaataattagcactataattttgtttcttcaatcagtctttatataacacaaacaacaggaccattcttctagaatttctatcacctttagagaagttagataagaaatgaacaagtctaattacaagaactctctaacagttttaccctacccagagtgagagcctgaacagtcaatatagagaaaaattttaaatagataaaaagcattacttttaaactctgtcagcccatataatctgtttccaaaaacagtccctcagcaacctgataatacaatagactaatgaaggacaaaatttaaaacattttaaataaggctttattaacaaatacaaagatttccatatacttttaaaaaacaaattaaaactactgctgttaaaactattccattttcaatttttgctttttgtccctaactttggtccataaattgatatatcaacaactgaagttaaaatttctttatttctttttttttttaagacggagtctcgctctgtcacccaggctggagtgcagtggcacaatctcggcccactgcaacttccgcctcccgggtccaagtgattctcctgcctcagcttcccaagtagctgggattacaggcgcgcaccatcacagctggctaatttttgtatttttagtagagatgaggtttcaccatgttagccaggttgttctcaaactcctgacctcaagtgatccacctacctcggcctcccaaagtgctgggattacaggcgtgagccgccgtgcctggcctaaaatttctaaatctataattagcataacagtcaaagttgggcatggtgggacacatttgtaatcccaacactgtgaggctgaggcagatagactgcttaaggccacaagtttgagaacagcctggtcaacatagtccctaaaaaaaactaattaataaacaaataagaaaaaggaaaaaagtcaagagagaaagcacataaaatgttccttacttctccatttccatgtttttataaccatttatctaactatctatctatctatctatctttctatcaatcaatcaatcaatcaaagacagggtctccctatgctgcccaggctggtcttgaacccctgggctcaagggatcctcctgccttggtcacccaaagtgctaggattacaggcatggaccaccacacctggccaagcttttaaaattacatcatctcctattagcttttttagtagaaattcattttgcaatgtctaaaatctacaacaattaaaaatgcacctgcattcaacaaaaactgctgagacaattggttatccacatggaaaaagttaaccttacaacctcatctcacaccatacataagaattaactcaaaatagatcacatagttaaacatcagggctaaaataataaaatatttacaagaaaacataaaagaaaatctttgagacttgggctaggcaaagatttcttgcctatgacatcaagagcatagtccataaaataattttaaaaactaataaattggacctcatgaaaattcaaaacttttatacttcaaaagacacaagaaaatgaaaagacacaacaaactggaagaaaatatttgcaaaatatatccattaaaggatctgtatccacaatttacaaagaatcctcacaactcaacttataagatgacaagtaacccaattagaaaataagcaagagatataaacagacattccatcaatgaaaatacataaatgactagtaattacgtgagacaatgttcaacatcattagtccttagggaaacacaaaattaatgcctcaatgagatactatttcgcacccactagaatggctataataaatcaggcagacaataacaaatgttggcaaagatactcagaaaagggaactttcatacatctttgatgggaatgttataaaatggtgtgaccattttgggaaagtgttgcagtttctcaaaaagtaaaacataaaactacgatatgacccagcaattctacttctagttatttacccaaggtgtatgaaaacatatgtccacacaaagacttacatgtgaatattcgtagtgccattatttataatagcccaaaacttgaaaccatgaccatcaactggttttgtatagacaaaatgtggcatatccacacaatggaatattattcaactataaaaaggaacaaattaatggcacatgctatgtcatgcatgaatctcaaaagcattgttaaagaagctcgacacaaaagatgacatattgaacgatcacgtttatgaagaagagcctagaaaaagcaaatttatacaggcagaaaacagattagtgatttcctgggactgagggtagaaatgagattaactgtgaatgggtataaagaatcttactgtggtgtcctcaaatgtcctaaaacctatctataatgatggttgcaacattcggcaaaattagtaaaaatcactgaattgtacacttagaatggatgaatttcatatataaaatatacctaaataagttgttttcttttcttttctttttttttttttgagatggagtcttgctctgccgcccaagctggagtgcagtgatgcaatcttggctcactgcaacctctgcctctcgggtccaagtgattctcctgcctcagactcctcagtagctgggattacaggcgcctaccaccacgcctggctaatttttgtatttttagtagacatggggtttcgccatgttggccaggctggtctcaaactcctgacctcaattgaaccgcccgcctcagcctcccaaagtgctgggattacaggtgtgagccacagtgcccaaccataaagctgttttctaacaaaaaaaaaaaacatgactttttgtttcgcttgtcccttgaagaattatatgagtaacaattgtactaatcctaatcttggataggaaaccatggtatcacttttgagaggatctaacacagtgttaggaaaactccttcaactggttgttcattggacagaggttctccaggaaaagaatttctcataaatcaaagttctttctgtttatattttaagaagccagtgcctggaaacaattcaaaagtacatacaagagatttaagttgtctttggcaatggactgattgatctgatgagtattctactctacattcagattacagtatatgaacttaaaaagacaagcaaaaacttttaacacaatatgaaaggacatagggttaagttatataactttgtgtgtacatgtccaaatgtcaaaggcgctgtttgcttgagcaactgtataatgttgtaacacaatagtccttaataataatactaaatgacaagtaacattacaggcattaatccaatccctggattgtcctgtattcatcttaaatacattctaactatccactctacttataaggtctttcaaaaataacccaggactttataaccctcacaggacagcaaagaattttacaaactttttaggtctttgcaaaaataccaccttgtctgaccaccttattgaaaactgccaacctcacaagactctctatcttcccttccctgattcgtttttctcaataaaattaaacataccttttacatatatattctgattactgtctgccttctcctactagaaagctaaacaaaaagatctgttttttccttgctgtatcctcattgcctagaacagtgcctaccacgttgcaggtgctcagcgttttttgaacacatgaatgagtattaaatatgtgcaagaaaacaggagctgattcttaccaaaggaatgaaaaatgagtctcttctactcattcaacagccttgacttggggttaaaatatgaattttacaaggaaatagagacctcagaataaaatttccagactgcctacccagcatttcttcagcaaagagaaaaaataaaggtcaatatttcacttataattctggatttgcaacaaagtatttttaataaacaactgtctctattctggagagaaggcaggttaattaaatcmcatgtgactaattaacaaaaaagaaaacaaatgaaagttccatacttaactattcttactagttacttaactcgaataaagtataacatttcaaaagcagcctgtttttctacattcaaaaggggatcctatctccatgaagacagaccttagcagaatatgccttagcagtcctgacctcctcagcctcaaatcctccaaacaccaaggaaactttttctctcccttaccctagaagtcttcccatagccattttacaaacacaaacaccttcagacctctctgttttaattaacctctgacccaatccagctgcattccagcgttaaacaacaccccaggaagaaagactcacaacctctggcccctggagcatcccccaaacagtcacccccaacaaccgagagtcctggaacgtgaaggaatctggggatggcagggacctcccagcaagaccagaattggaggacatcttagacttcactctggtactgaccatttctgtgtgaccttgggcttgttactacatctctaggggtcctagttttctcacctttagggtgaggacaacatgttgaccaagtcactgtgaggattcaatgagattccatgtaaagcacctaacagggcacccggcacgaaacggcgcctcagtcctcagtagcgtggatgatccccgccctaagcctacaggctcagagctggaaggcgcctcgcagaacgagtccagttctcccgattttgcagaggaggacactgaggtccagagaacacagaagtgccttgctccgacctccagaaaggcagatgggcgcggaacctggaacccaggacgcccatcctcagctcacacccccgccctcttccctggaccctgtggggcccgggcgccggtgccaggcgaggcggtgcgcgccaccctcccggggccccagctccgcgcgacccgggaccgctccacctgccgccgagccccgcgcccgccggaggcccggggctcccgcctctcccctcggcctcccgcaagtcaggcagccccgcacagcggtccggagcgcgtactcaactcttcactttgccgaaggtgccgacgcccagcgtgtcgcccagcacgtagtgtccgatcttcacccgcccgtcgtgcttctgcttctcagccatcttcggcgcgcgcggcctcgctccaccgcctgccgctccgcgtagccgccgccgccgccgcctacccacagtgcagcgggccctgcgggcgagggggcggaccccgagccgcgaggggcgcggggcgggcgcggggtcccgggagagggcgctgggcgcttcgggcccaggtgggaagcaacgggcgagcggcgggcggggcggggccgagggagggagcgcgaggcgcccgctcccgggagtgagaggctcctgcggcggaacccgaagcagcgacagcgggggccggggacgcggggcgctgggcgggagtgcgggaggggctgcgccagatgcgcggggtccgagtgaggggcggaggcgacaggtgctgcgaggggggtaggcgagggtgccgagggaggcaggaggccctttctgaggaaaaccgaagggggtgaaaatagggggtgagactggggcccgatcctagggaatggaaagacttggaagtcaaactggaagaagagacgggcctcgcatgtcgggagcgaggggctgtaaaagggaagaatcgggaggggagactgcgggaagggccctggccaaaggggcagtggcaggagagcctctaggaagctcctcaagtctcgtctgaggcttttggatacaggtcgcggcacagggagaatgcacgcagctctgtgctctcttgaattgtcctcctctacttattctgtaattcccaattattttgtcctatagatggaagagaccctctccgccagagctctcaattttaactaatttgcccacagttttccaaaaaatctcagtcacggtatttgctcgagtgttttttagcacatgcttatataaatatgtagttttaccacgcgcttatataaacatatagtaccgaaatgtgatacagctgtacaagaaggaaatgggaaagacgtggaaagggaaacaatgttctgcccacagaaagtaaaatacgtaagcgacagaggaattgtgaagggcgaggccagtataaggtcacatattaaaggaagaataaatgtgatatagaagtgaaaagagtggtaagaggaaattagaagcatgatgcctaggcagcgtgttcaaagactgacctccccaccctccccccacaaaaaaaaagaaaaaagactggcaaagaattaggtaataaagcgattatctctgcctctcttccttctctcccgcccttccttccctccttccttccttcctttaatgttgtctcattctttaatgttgttctgtctttcagtgattaaagtttatttgcttctcaccacacacacaaaaagattcgtatacaatatgtttgttaattagcttgacttatagccattccacaatcaatatatttcaaaacatatacatactraatatatacaatttttatttgccaatgaaataaaaaattttaaaacagtaaaaaaaaattctgtttggggataagtaattaaggattagtcaaacatttatagcactgcatgccagtagagtttcaaggtcacattcctcaaacatgaagtctcttgaacactgtttatatgtaaattgaaatgtattgatcaaaaagaataggacacaacaaaactttgttttctgataagtactaaatatagaaatttcaaacattcattctcatccaaacatcaagacaatctgatgagagatgatcacagcttataaattatagatatcacagctgttaaacagaggctatttttgttcattcttcagatcatctttcttgctgacaagtatcatctaggaatcactctacctcgctggcaattttgagaaaatagccagttatttttgtgctgaactttcatctggttaagggtcattccttcagtattcaagtgagtaagaaaagacctattctgcttttgaggtatgagatgtatatgtcttctgctctaatatcccgttaaaagatgttgaaaagtcttcacttgaagttagatgattgctttcttgaagctacataaagactaactgtaaattgagatttcaaagcatttcgtactgtcttaactatttgttgataaatactgtaagttaaattattatatacttcataactatgattcttacatagctactgtggactaccttatagttttgttactatgtgaaacatctatgatactttgttgattaagaagttcatttaaacacaattatttaattgtcataaaagaaagattatyattcccattttatagatgataaaacttagtttttccctttctgatttgcccagggctaaaaagtggcagagtcagaactcatatccagttctgacttgtccttcagtctgcctactataccgcagctgcctatgccaaaagaaagtatggtgctctaagaaagttaaaaattgtcacagttgtggttccattttcatatttttattatttcttgggcagtccaataatatatcctataaatttgtaagtatttaaactactttttgttgtttttctgacttttatttagaggaaaggttgaatggtaagtgggtaagaaggacaactcttggtggcagtactcagccctctgttgtcctggacacttcaagataaggttccatatttgcctcttcctactcagcagtagaaaactcgacagttaatcagagtagatctccttaagggtcatgcctcttggaggtctcacccctaaagatgacctggtaaatgcaatgttcccattttattatcttccaatgaaggtttcacgccgctattgtttagtaccaatctctaagaccagtgccccagggaggtgttcagttcttagcgctggtccaactattgctgctttaccctcctgcttctgaaactttggggttgttttaccttcaaatattctaaaataagtcctgagtaggacattaatgcaagaccactaaactaatatactgtactagacaccaytggtattatcagtaaccaattatttcaagtctttgctcacagtcaccttcttggtgaaccctaccctggccaccctatttaagttgcagtttcttttttttttttttttttgtaattttttttaaatttttttttttttttttttttttttttagaagcagggtctcgccatgttacccaggctggtctcaaactcctggactcaagtgattgtcctgcctcagcctctcaaagtactgagattatgggcgtgagccaccgcaccaggcctaaattgcagttttatctcactcatgctctctgccctgcactctcatcccctgaccctcctcaacttttttacatagcactagccatgtaacatactatttaatttatgtgcttattatatttttgtctgtttctcccaattagaatctaaacttcacaaaagaagagaggccttttttctctattttgttcactgatgtatccttagctcccgggacaatgcctgacaaaatatagatatccaagcagattcagaatgtggcacctgaagtttattcagtgtgggggaatctctttaagggaaaaaaaaatgcaaaattgggtatgaaagtgagaatttgaagtgaaaaacaactctctacaaatttataaaagctgacaaatgccacaaacatccccaaatccagacaaataacaatatttttataaattaattatctaacatacctctataatacctgttttctacattttctggctgtatactctttgattacctctttatattttgtaaatttttaaatagaatagaaagataattctgacattaagcatgattcattaagtttttcatcacatgtttctttttaggttttccattgtacatgtttaatatagctaatatagaatttatcaattctattatcatatacattatacatacatatagatagatacatatatgtatttatatttacatattatatatgcaaatgatatgttcataccccacttgctgtttctggggcctagtggaacctggtatatcattccaaaaatatttgctaaattgaattttagaaagggttagttactaagctagagaatcaagtaacaacaatacagggaagagtgcagttttattttatgtatacacatattaaaggcaaagcataattttacatctcagcacagcagtcattagtgaggttagagaggcatgagttagcacctttgaagtctatagattcatgatatagggcttctatggctgtctccaatttaaaataaaaaatttggacactcaatgaataataaaggatgtttatggtattttataggaagtacaagctcaataattacatttttaaaattttgtgtgaaaaacttcaaacatacacaaaagtagagtaacataaataaccttagcatctgtgatgatcaacaattgtcatcatttacccatctatctctgcacttttaaaatttattttcaggagtatgttaaagtaaataagcagattatttcactggcaaatacttcagtatataggtctaacagataagcacttctttttaacacaaccatactactactaacatatctaacaaaattagcactaattccttactgttatgaaatacccactctgtggtgaatatcccttgattgtctcaggaatgtagttttacagttggtttatgctcatcaggatcaaaaaagtcacacttaccattttgtcaatacatctsttttaatatgtagtgttttcycttcccactcttttttaaaaatgtcatctattagttgaaacattgaattattttaactgttgaatatcccgatcttgttggatttatctcaataattattcatgatcacaagaggtagtagagaaagctcagtatttggaataaaaaatcatggcctggtgcaatggctcacacctgaaatcccaacactttgggaggccgaggcaggtggatctcttgagtccaggagttcgaaacccgcctgagcaacatggtgaaaatgtgtctgtacaaaaaaataactggactggtggagtgcgcctgtagtcccagctactagggaggctgaggtgggaggatcacctgagcctgggaggcagagattgcagtaagccaagatcacagcactgcatttcagcctgggcaactgagcaagaccttgtctcaaaattatatgtataattaaatatgtgtgtatacatgtatatacatatatgtatgtatgtatgtatatatgtacgtatatatgtgtatatatacgtacatatactctctctatatattatctatgtgtatatatttgtatatgtacatgtacatatatatcctgagttcatgttccatcttagcctcttagcaatgtgtccttaaacagatcatttcacttcttattggtaaaactaatagtgttgaactagactataaagtactaaagtacctgtcaggtgttgggacattcaactcccaaactccactccctgttttagagttaaacaatagagggaaaaagatagagtaattactgtaaagtattgtaggtcaccatccaaggtatctcaacaaactgatcttgccacattattttccctatacacagtttatctcctaatatttatcatcattggtttgtaagtttaagagaatactattatgggcctagcccccttcaaagagataagtagatacacgtgacaatacttgaaaccctttaaaggaaatgtaataaataattttgagatgttatttttagcaggtaccctagtaacaaatattatacttaatccattttcattttgtggctgagtacatttctaaattgcttcaatatgagtcaacattataattttcagtgcagctgagaaaaaataaaacgttttggatcagacttccttcatgagcaaatgcattaattggaataacaaaggttgtttgctttgctgtataaacattatggatctgacagcacttttagaatcttgctttcatgtgtgtgttgacagtttgtctgaaaaaaagctcaaacacacttttagatcagttaaatcaattatttccctcttggcatggattcagtgactatctgtactgaatacttttgaactggtgaagttggagtaaggagataccagtgtcaccttgagttgattatcatctctgttatggctgtccgttggaattaaaacaccccttgacaaaactgtgtaatataccattatttgaagccttttataatactcttttaatgacctcaagtgggtgttaatgctttggctgttggcacaatcccgttaacattaactattaagctttgacatgattaatgcaaacttaagataaataggtaatttcaagttctaaatgctctataaataataaactaattctcctttcaagaataaggaccttaaaaaaatcagataattcaatttctttttttaatttgtatataggcttagactaggtgccctttcaagactctggggtttcaattctgtaaaattctgttaatagttttaaaagcattaagtaataaacttttcaccttctacttttaaaatattgaaatgtttttaaattgttacacaactagctattccacagacaaaagatttctagattctcggagtatatcattgctttgttctaagtacattcattcattgaacaaagatatattgaatacctactgagtggcacactactcttctaggcactgggaatgtagcaatgaacaaaacagatagtataacctatcttatttactacttataatggtagtttttgttaaagaaaataataattcatgacacttattaaagacagtaaggcagactttatttgggactattgtgaaaggtataggacctcctgcaatgaggttttacagtaggagacagagattgggctcaactccaaatacaacaaagaaaagtagagatttatagccaaggaggagggacaagatgtgttgatgaatggaaaattactaggagggtggggtaattatttgctaaacggacctaacaggattcttgctgaaggcaggccagggtgatcagctattacccagggaatggtgtgggggtgagaaatttggttagacrtcaagagtgatcaggtagtgagggtggggaattttggctaaattggcttagcagaattcttgctaaaactgggctcttgaagacatgcccaaggacaggacctagtgggtcagaggagtctgactagagttaggtcragaaaaaagtgttttgttgcattctactgtaagaaccagaaaataaggagtcaaataaatatataatgtaaggttagtgttaagtgctgtgaaggaaaagcagaataaatgaatacagagatgaaagtggggatgggggagggcaggcattttatataggtcatcaaaaagtctttctgagaatgtagcatctaagaattatgtgcaggaaggagccattgaaatagttgggataagagcattccaggcagaaggaatagcaagtacagcagtcctgagacagtgctaaaggcatattggtggaataacaagaaggttgatgtgtccagagtggtgtggacaaggaggaggatgaaagggtttgtggttagaatgcctatagctagattatactgggtaagctgtattaaaacctttagatttttaaaaaagtgtagtcaagtatattctgataatttttgaacargagagtgacacgatatgaattataaacttaaagatggctctagatggttgtgtggaagagagtctaaggggtcaaaagtgtaaacaaaaaaactaatttagagactattgaagtagaccagatgaatgctgatagtagcttatactaggatggtagcagtgaaaatggtgagaggcattcagatttggcatgaagattttgaagttaacatcaagaaattttggtgatggttagatgaaaagtgtgcaaagaatcaaaaaagagaaatcaaagacttggatttttggcccatacaatgagatgaataagagtgccatagactgaagtgccaaagactttatgagaaataagctgggggaaaagaagggaggttgcgggacaaaattctgatctgaccatgcgaagtttgagatgcttaatagcaatcccaaaggacacaccaaataggtagtttgtgaccagagtgaagaggcccagactcaaaaatgtaactttcaaaatcatcagcattcagggaagaggcccaaattcaaaatgtaagtttcaaaatcattagcgtatatcccacagcactggagatcccttaggaagtgaatgtagacagcaaaaggaagagactccagggctgaaccatcccagacttagagacctataaaaggaagaggattggccggtctcggtggctcacttctgtaatcccagcactttaggaggccgaggcgagcggatcatgaagtcaggagatcgagaacatcctggctggctaacacggtgaaaccccgtctctactaaaaatacaaaaaatcagccgggcgtggtggcgggcgccagtagtcccagctacttgggaggctgaggcaggagaatggcgttaacctgggagctggagcttgcagtgagccaggatggcgccactgcactccagcctgggcgacagagcgagactctggctcaaaaaaaaaaaaaaaaaaaaaaaaaaaaaaggaagaggatcctgaaaagaaatatccactaagccaagaggaaacttaagagaatattttcagctattgtaagacattattatcaactgtatccagtgctactcaaaggtcaaggaagatgtgggtgaagagttaactaccggatatgatgactgtgacaagtgactttgtagtggagtgatggagatgaaagtcagagtgaagtgagtttatgaaaaaattgaagtgaagaaatagagaaagtggttctatacaattcttttaagttttgctatgaggggaatagcagcaaatggaggatatggaaacaagggtagattttttaagatggggaaaagtatagcatgtttgtatgctacttgtatgatccatagaaaaggacgaactgatgtgtgagagagaatgaataactgaagaacatttagcagtgaatccaaatgacagtctttcaggacctttcacatcagttttccaggaacttgtactctaatggaaaacatacacacttcagaaataaatttcagctgggcacggtagctcacgcacgtaatcctagagacttgggaggttgaggcaggaggaccacttgaggcctggagtttgagaccaggctgggcaacaaagtgaggctaggactatagtcccagcaacttgggaggctgaggtggwgagatcccttgagcccaggagttccaggctgcagtgagctatgattgtgccacagaactccagcctgagtgacagagtgagaccctgtttccaaaaaaaaaaaaatctaataaatttcaaaatggtgcaagaagtgatatgacaaagttacatataggattgactaaagagtactgagcagtaagttaaacgctcttttatttgacaaggggaaaaatgatgaggacctgaaccactggtagtcccagtaaagaaggaagggaaaggatggatttaaggattgtttaggagaaagaataaataggatttagcaattgcttagttattaattagaagaacaatgaagcaatttgggatgacttacagatttctggaatgatacagaaatcttgtggatgrattgatcattcaaaaacagttcgtagcctatcacctccttccttaaaagtgttcaataatttaacataacctaaagattagtgtttaaaactctttagcttagtgttcacagcccccaaaaagtctgcctttttggtatgctctttaccttctgtattagtctactctcacactgctaatgaagacatacctgagatggggtaatttataaaggaaagaggtttaatggactcacagttccatgtgactggagaggcctcacaatcatggtgaaaggcaaaggaggagcgaagtcatgttttgcatggcggcagttaagagagagaatttgcaggagaactcccctttataaaaccatcggatttcatgagacttattcactatcacaagaacagcatgagaaagagccattttcatgattcarttacctcccaccaggtcctccccatgacacataggaattatggcagctacaatttgagctcycctgtggggacacagccaaaccatatcaccttcctaatgtacttccttgaaactcaaggaagtagtgggttccagtttgaaaattactggtctacagagaaaaatcaaagtccttaagtctggattcaaggctctctatgatctggtccctaccaacctggtttcttgtctcatctttgttatccaaagctctagtcatatcaagtttctgtcagtcctgtgtatacaccaagttggagcaggccactgcacctttactcccactcttattgtctggtacttccttcatccttgatattctccattacaatctgcctaacaaatacctccacatctttaaaaactcacctcctctatgaagcatttccacaacctcccacacacatttgacctccgtatctttaataatgctgtgcaccttgggtatttaattaaatccatcattgtacttatctgtttacatgtcttgtccaccatttgactatcaatcccttgagagcaagcactgtgaacatagtaggcacttaatgcatgttagttaaattaatgagtaataactgaatgaaatctcagttcagaaatatcttttttttcttttctttgaaagagtcttgctctgtcacccaggctgcagtgcagtggtgcaatctgggctcagttcaacctccgcctcctaggctcaggtgattctcccatctcagcctccacagtagctgggaccacaggcaagcaccaccacactcagctaattttttgtatttttagtagaaacagggtttcaccatgttggccatggttgtctcgaactcctgacctctagtgatccacccacctcagcctcccaaactgctgggattacagatgtgagccactgtgctcagcctcagaaataactttatcttattttacctatcccttcccaggtagcactgaaggctttttcctatgtattgttctgaggccctatatcacctctgttctagcactatattgtggtatgacattgtatttgttccatgacattatttttcttcctttttttttttttttttttttggtgtatgtgtcccctacctaaaatattcaagggcatggattttatcctgtttatctttatatccccaccacttgggtacccagtaagtgttttaagaaagtattatttaataattaaagagccaccttaccctttaaagtcatacatcatgtaattatgcccagctttttccacttttgtgaagaattttctaatcattcctggcttgagttaatctttctctctggaattctattacctgtagttttctctcttttgagtaattatcactctctggaactggaacagttcttgatttagagtgactataaaagcccaaggacaagaaaacttttattcttcgctatattgctatacagttgtggctctcaactctccttttttgtgtactgctatacttgagtagcacacagccataccaatttccagggtgctcagattcattctaccctttcctactggaagaggtaaaaaagcaacaccctagaatctgatatgatttattttatcaaaataaacaataagctactgcttttgcaccattacttgcttctatttataacaacctcttgccccactgagaatgacaacgttatagtcattctttaagtagtgatgaatgaatttaaaaaaggaaggaatgctatttctattgtcacgtccacagggaagtcagaccatgccttttatgcaaaactggtttgctcatttaatatattactatttatggccaggcataatttatttgtgtgggctagaggaacacaatattgtccttcataaactaaatcccaaataaaataataactttactttgaaaaattatgctttttttcccagaccatgctagccttggcgacaaatggaaatgttgcaggaactgaatttttcctgatgttttacaaaattctgctctctgttctctatggaacccaagtgacccatactcatttccattttccagtgttccttggctctgctcatccatccagcgctcattgcaagtcctaaactttaggagaagggattttgttttctcttcacattgcctacaaccctttaccaattgaaaagatgatttggggccaggcrtgatgactcatacctgcaatcccagcactttggggggccgaggcaggtggatggcttaaggtcaggaatttgagaccagcctgggcaacacggtgaaaccccttctctatgaaaaataacaaaacattttaaataatttaaaaaaaaagattattttattcctttttacagccctttacgaagcaggatctgcaacaaatttctcaggaaacgggctgagcaacacatgagggatatcacccacaaacagtgatgagtagttattgttgcaaaccataattkwgttgcccgagtctagtgtrcctttcttctttcttttgccacttgggtaattctcaccttctcagggaacatcttccactttcccccaaattgatggcagcttttttttccccccagtttggttttcctctttgtatcatcatcctagtgccccagaaagcttctcctaaagggggcagggagagaacaacgcatgtttcaaggaggtccccatgcaaatttgacactttggtacccttgccagtgttccaaagtgaccatgcagatggcattgccaccataatcctgttctttttttgagacagagtctttttttgttgcccaggctggagtgtagtggcatgatctcagctcactgcaacctccacctcccgggttcaagcgattcttgtgcctcagcctccattacaggtatgtacctccatgcccagctaattttttgtatttttaccagagatgaagtttcaccacataggcctgactagtctcaaactcctgggctcaagtgatctgcccagttcagcctcccaaagtgctgggattacaggcacaagccaccgcacccagcccataatcctgttcttatgttctttcattatttattcacttgattactaacatagattacgtaataaattgtgtagaatttcaggaacacttagggaagtaataaaaattataatgtatactgagatgcttatcatgccatctctcatgagtttttccaggaaaaaaaaaatagaggtcaaagctatcttcaactgtattctcataagtggggctttaaaatgctcccatgaagaataaaaagaaatcatcctatcttcctctatttttaaaatgtatatttaaaggcttttctgatatttctcaaatgttttaggaacaataaaaaaataaattgagagatattctctttttttgtactgattctaagtcactttataaaacatctacttcttttaatatgctttattcagttaattataatttggtttgctataaagtttactcattggggaaatattttttagtaaactaaatgctagtttttcagaatgtaattcaagcctcaagaattttttggccgggcgcagtggctcacacctgtaatcccagcactttgggaggccgaggtgggtggatcacgaggtcaggagatggagaccatcctggctaagatggtaaaacctcgtctctactaaaaatatgaaaaaaaaaattagccaggtgtggtggtgggcgcctgtagtcccagctactcgggaggctgaggcaggagaatggtgtgaacctgggaggtggagcttgcagtgagccgagatcgtgccactgcactccagcctgggcgactcagcaagactttttctcaaaaaaaaaaaaaaaaaaraattttttattgtctaacatgctagatacaaaagaattatcctatgaacaacaccctcaaggcttttaccttctcaaggagaagacttgtacccatgaaataattttaaaacaagttacttactttttaattcatgaatttaaatggcaccttattatattcctttcaccaagctctctttggttatataagaaagaagttaactggatttttgctacctattttcattgactattacaaaacacttggagtcatagacttataaaataagagtgtgattatacaccctttatgcccttttctttactaccccattctaaaatctaatgggatctttatgatgcccacagggcaaaagctaagtcatgtggtaatttcttaatgaaaacaacctggaagacaaggaggaattttttttctttgagatagaattaatcaaaactgtctttaacaaatgtcatgtttctaagtcccaacattggactatgttccttgaatccaaactcagcttccattctgaattattgctggaaaggctctcagcattggttgtatagacacctgttgttaactcttatcacttgcctcttactttgcctcttagtttactgattaagtctaatctgcattcttgatacttagccctgttttccattcctactttattcaacatctgaaaagctcaacaacttcttgatcatctccatcagtccaaaactcattctatgaaatttggactcaccctaggaaactctaggctttcacctgaagttggcataatatcagataaaccaggaacataccactctgtcaagtttcttggtcacaacaagtaatatccttaacctggtcatcacctagcatttatcgacattgaaaagagagattgctctttcctctttcttgaaagagggtgccataaacacttattcttggactctatttaaagacaaatctattgagaggtatcagatgaagatatatgtagattagttgtagagggaatgaataactttatgaattggggaaatgaattcctagtttggttaaaagcatattctataccttatttcctgttcaataaatggagcattttcrtggaaaaaagccaaaagttttatgaatagtcccttactttttcccatctgttagaaacatttttcaaatataaattaaaaatgaatccctacaagaatttgcatgttctcactcctttgctgttgggagctctatattatttgtgtcacgagtcttagcctagattgtatctgatggaatccttccactaaatgcaataatcagataaaaagaacttgatcttactatattccaagtgcttttctgcactaaacaaaaattttgagaattcagatgttaactattttaaatcattttactatttcttccataatatgtctaagattctaaatttaaattttctggatattcattacaaatctgatatttcatgaaacaagacagcttttttgtcaatttttggataattcatctagtctctgtactgttattccattttgacctataaggaaaaaaaaaccaacatcacttaaacacttcactaagaaatcacatccatttgagtcctcagaagttttgtcatgaacaattaagtttcaagatctcttttccttttgtataaccacattaaaataattttttctacttttttttttggagacagagtcttgctctgtcgcccagcctggagtacagtggcgggatctctgctcactgcaagctctgcctcccaggttcatgccattctcctgcctcagcctcccgagtagctgggactacaggcacccacgaccacacctggctaattttttttttcatatttttagtagaaacgaggttttaccatcttagccaggatggtctccatctcctgaccttgtgatccacccgcctcagcctcccaaagtgctgggattacaggcatgaaccaccgcgcccggccaatattttctacttttgacacatgcttagtctatctataactacagaattgtaaaatcttggtttggaggagcaaggggaattgtagagatgatatcactatactatttctggatgactggaaagatgcgattttgtatgaacttcatcttaaagtacttcatgacttcagtgtgaaatttaaattataaaaaatacgcagctaagccaagtgagtttagcaataattttatagaaattgaaatgtttattatatgtgttgaatggtaatagaaaacagtttgcattctactatttccattttttaaaaattatcagctttttcattcgtttctattgttatctactatttactgtgaaggcactgcattatacaacctaattgaaatgtttttaacagtgttagtatagtaacagtcctcctgacagtctcataactacaggatgtcaatctctgaaggtattcccagtaaggaaatcacaaaagaaagaaatgtagaaagaacaaattcaagaactgattttcatcagtagtatagtaaatgaatagtgagtactccagtgatatttcctaaacatataaaaattgtttgcacagatctctgtcttatacacacacatacacacacaaacacacacacacacagcttagcaggaaaatacttcagtatgtaacagagaatgttcaacattgtttctttaaaatcaaataatctcactgagggaaggaaaagtgaaaagtctcaggtagaaaaagaaaatggggaggaaaaaaccaatacagtatgttagttcttccatgttatataatataaataatttcagcactgaaaaaggaatagtaagaacaatatattctgggttatgtatgcatgcattcatgtagtcattcaacaaacattcattgagtgcccactctgtgctaaggattttactcggccttgggtatatgaagaaaaaaaaaagctttatttttatctcagaaatgaaaaatcagaaagcataatgacaagtaaaatgatagaggtaagcacaaggtatgaaagaagcccggaagaggcataaatactcttttgttttatgctatcttatgtttaattaatgtattagatttctttctctaaatttccactctggctcccaagcaatcatgttctttgcaaggagttgtccaaagaaatatttaaaatttccttaaatttacaatgccattttagtatttaactctttttgcaactcaggcacatgatttagctttttaatctgtagtcatagtagattgtgttatttttcagctaatatttgctctcctacatcctcacccaccccatggaaagaatatatgtcacttcatcaacaaaaggcttggccatgtgactttctttagccaatggaatgtcagtagatgtaatttaccacatccttgcagaagttttagatgtgcctgcatgaattggcttggtctcttgagcttctgatctctaccaaaagaagcgctttcctcaggcagtccaggactgcaaaaacacatacagcccagcaaagctgtagccaacgcaaaggcctgtaagcatgaaataaatctttattattgtaagccactgacgtcttggggttgtttcttactatagcaaacattgactaatacaagtgttgactttataagcacactgtaagaaaagccataagcaatataaacaaaaggcaggatgtttgaatttactttcaaaacaaaaagatgctaatgttatacacagattgtggaatatgctacaattgtgtcatccttaacacagctactttttcaccttttagtaatagagtgtatgcataagatgcgaatatttaggagccagacagtaacctataggtatgtctatgtgtctatatatttgtgtgattaatagctgtggatctgtcatgattcttcttacattataaaatttaaaaggacagtgagtcatttttataataaaatctattgccatcattctaattcaacccaaataacttagatgggacagaaactctgttttaccctaataaaatagaacttaaggcttagtaaatgcttcagacagttttctctatgtaccagtgaccacaaaaaaaaaaaataagtattgtatgactacaatgttacataactatataccacggatatgtgcgrtaataaaaagagcaagaataccaaacatgagtaatttccctcatttgtagcaagattctggttcaaaaactgagaaatatttctwgttcaatattgtacattagtaatggatcccaaaactttaaaagcatctatgactaacatttatcctgcatatgcttctgctattctcactagaccatatttgcaatattataggaagttggctatctcaaagtagactgttctaaaattaattataatgttgaagatctgtgtgtgtgagggcagaaaacatgtaactgtataaaccaaaatgatgttatgccattcccagggtgaatagttttatgtactctaaaatcatgcaagaaagcctgcttttataaattgagaaatgttttataagcaccagtgggatacaaacttcttttcacaaagacatatattgactcattcctcaagtatctggtatttgtgatctaaatgaaaagtatttttgcagctgattttttgcaatagcttttcattgtaccctgcagatgtattaatgtgtttttatcatgttgacatcttattataaacaaatccattttatgttaaacttaggtgtttctcccatgcatgtattaagaggaagctggggactaatttgcatcaaggaagcatctctaacagttcctccaggagtccctgtagacttttaccagcttgagactgaatatttgagggggagggggtcaggatacaatcatctaaaatgcaaacaaaaaaagtgttttcctaaagttctccgaattaaaaagaaaagaatatgtttgggatacaatacacaaatttatttgaattcctttgccaattccaagtgaatccacagccaaacgaatgaaacttatggttgcacagctggaggcttattacttcttcattttataaaaacaaaaccacaagtgattgtgaaccagttggtctgaatttatacttatagcaaataagtataaattacttcctctgctttctcaaggtgctgaatggaagcatttgtcataaattcatcatagactgaatgtatgagactgaatattaagactgaaaatacccttttaagaagtcatttttgcccattcattctgttttgttcctttgtccttctgyttctttatttattcagtcatttcgcaataaatatttattgagttcttcccgtgaagtaggcactgtgctaaattttggggatacagtggtaaataaagacaatttattttggaggagctccaaagacaattccagatctttctcagatttactgatccatttattcctgtttatttccaacacgtaatacaatgaaaacagtcaaacagacatgaatttaatttgcatttcatcttgggcaagatgtttaaattctcagaaccttagctttcatatctcccatctacctcaaagaatgatggaaagtgaattacaaagataacctataaaactgcttgacattttgttctccacccccaccccaaatatcactgttccctacatatgttgggtcctagaggtataaattgataggatacattttctagcactgtgcttagttgtagctaagaatatagagaaaaaacaaatgatgttcctgccttctagaagattacatttagaataataatgactaacatttgatatataccaatgactgttctgagcactataaatggatgaactcacatatcctcacaataatgcatgagaaaggaattgtaggcatcatgttttctgaatggggaagcagaagcacagaaagttaacttggccgaagtcacacaaatagtgagtagcaaggtagaattcaaacctaggtgcctgtctctgaaacttgttttcttaatcaccatacctcactgcctctcaagaggaggctattaagtacaagaaaattactgtaactgttttatgagtagtttaagcagtaagtgaatgagagaagagaaatcaggggatttggtccagaacctgaaaaactaatcacattttaatagaaagaaatgtaatgatgaagagagatactatagggcattttgggaaagttttatcactttagaaaatgattctttcatacatctaacccaaatatattatgttggacctcaaatcattccatttagtggagatacggaacatgtatttagaaaagtaactaaaaaatattattgtttctgatttataaaagtaacacatgctaataataggaaacctaacacaaatagcaaagtataaagcaaaacatttttaaaaaccactcctagtttcatcatccagaaaagataataactttaatatttagatattgtatcagtctgttttcacactgcsataaagatactacccgagactgagtaatttatgaaagaaaaaggtataattgacttacagttccaaatggatggggaggcctcaggaaacttacaatcatggtgaaaggcaaaggggaagcaaggcatgtctcacatggcagcaggagagcaagagagagctcagcagaaactgccagacacttaccaaacaatcagatcttgtgagaactctctcactattacaagaacagcatggaagaaacagcccccatgatccaatcaccttccaccaggtctctccctcaacatgtggggattgatgagatttgggtggggacacagccaaaccatattattttgcccctggcccctcccaaatctcatggtttttttttcacatttgaaaaccaatcatgccttcccaacagtcccccaaagtcttaactcgttctagcattaactcaaaagttcaagtccagccaggcacagtggctcacacctgttattccagcagtttgggaggccaaggtgggcagatcacctgaggtcaggagttcgaaaccagcctggccaacatggtgaaacctcgtctctactaaagatacaaaaattaggcaggcatggtggcaggcgcctgttttctcagctacttgggaggcagaggcaggaggctcatttgaacctgggaggcagaggttgcagtgagccgagattgtgccattgcactccagcctgggcaacaagagtgaaactccatctcaaaaaaaaaaaaaawgttcaagtccaaagtctcatctgaggcaaggcaagtgtctttcacctatgaatctgtaaaatcaaaggcaaattagttattccaagatgggtggtacaggctttgggtaaatgttcccattccaaatgggagaaattggctaaaacaaagggtccacagggcccatgcaagtccaaagcccactagggcagtcagtaaaacttaaagctccaaaataatctcctttgactccawgtctcacatccaagtcacactgatgcaaggggtgggctcccaaggccttgagcagctcagcccctgtggctttgcagggttcacgccctgcagcagctttcatgagctggcattgtgtgcccgtggcttttccaggcgcatagtgcaagctgtctgtggatctaccatcttagggtctggaagacagtggccctcttctcatagctccactaggcactgccccagtggggactctgtgtgggggctccaaacccacctttatccttttcactgccctagcagaagttcttcatgaggaytctgcctctgttgcagacttctgcccggacatccaggtgtttccctacctcctctgaaatctaggcacaggttcccaaagctcagctcttatcttctgctcacctgcaggcccaacaccacatggaagccatcaagacttagggcttgcaccctctgaagcaatggcctgagatgtaccttggccccttttagccagagctggagctggagcatgagatgcagggcaccaagtcctaaagctgttccggtgagaaaaccatttttcccatggggcttgtgatggcaggggctgccatgaagatatctgacatgccctggagacattttccccattgtccaggctaccaacatttggctagtcattacttaggcaaatttctgtggctagcttgaatttctccctagaaaatgggtttttctcttctgtcacatggtcaggatgcaaatttttcaaacttttatgctctgcttcccttttaaacctaagtttctcrtctccatctgagaccacctcagcctggacttcattgtccatatttctatcagcattttggtcaaaaccattccacaagtctctgggactttctagacttccaaacatcttcctrtctttttcagaggcttccaaactgttcctacctctgcctgttacccagttccaaagccacttgcatattttcacgttatctttatagcaatgccccactctttgcggtacacatttcctgtattcatcactttcacactgctataaagaataactgagactgggtaatttatgaaggaaagakgtttaattgactcacagttctgcatggctggggaggcctcaggaaacttacaatcatggtgggaggcaaaggagaagcaaggcacattttacatggtggcaggagagagagagagtgtgcaggggaaactgccagacacttatgaaacaaccagatctcatgagtctcatgagaatgccctcattataatgagaacagcatgggggaaactgtccccatgatccaatcacctgccttgacacatgggaattgcaactggagatgagatttgggtagggacacagccaaaccataacagatatatttcctttaattctcttttctgtgcatattgtattaaatatatttttaaataaaaattgacaagggacttatatgtagttttcagttctgctcttttcaccggatttttttttttttttttttgagacggagtctcactctgtcgcccaggatggcgtgcagtggcacaatctcagctcactgcaacctccatctcccgggttcaagtgattatcctgcctcagcctcttgagtagctgggattacaggcactcgccaccatggctggctaatttttgtatttttagtagagacagggtttcaccatgttcgtggcgatctcctgacctcaagtgatctgtccgcctcggccttccaaagtgctgggattacaggtgtgagcccccatgactgaactcacctgatgttttatccaaagcaacaaatactactttttcattaatgtcccaacaatccctatagtctgtttctgctttattttctagtatgtggtatttagtagctaatgtttactaacacttatcaccacctacatgctgcactttttaaaatctttgtctatctcctctcccactcctctatacacatacaagaaartaatatccatgaagacaagaatatatttattttgttctctactgtatccccagtgcctaaaatagtgcggagcccatggctggtactctatttgttgcatgaacaatctcacagaggaaggtataatggcaccatcacagtagatatcttaatttaaaagtagattagataatgttaagtactacattgaatgaatgtgaataatattaattacatagtcaatccttttcatgtcttacattaagtacccattcctagttatgtaagctaacatgtacaggtaatgaaatggacaattcctcaygaataatgaattagaggcttgcagcttatacatagttttgttctcaaaattctcttttttccagacgtttctcttatctcatcctctttgtcctgtcttttccttgtgcttcatgtattccctataatcctgtgttccagcttcactgttttttaaaaatttgcagtttgtcatacatacatacttactctttgaacttgatttcactttttttttttcagacatggtctcgctttgtcacccaggctggagtgcagtggcacaatcttggctcactgcagtctccacctcctgggcttgagggatcctcctgcctcagcctgctgagtagctgggaccacaggtttgtgccaccatgcctggctaattttttttgcatttttatagatgcggggtttcaccatgtggcccaagctggtctcgaagtcctgagctcaagcaatctgttctccttgacctcctaaagtgctgggattacaggcatgagccattgtgcctggcctaaacttgatttcactttgattgatgttttgttcatttgttcagctacatcttataatacataccttcaatgaaattcagcaattatctacattacctagatgttaggtaatagggaatgtacctatacgaactcccatcttctatataattaaaacctggatcattggaaatatttgtattcaaaaatcctgtctcttatctttatcaataatgtttgtattttctctattctttaacatatatacataacaagatgcatataaaagttacatttttaactccactcgatgctacaaaattatttaaataagataatgcatacgaaagtgcttggttgtgaaccaactggtataggtcaggaaaaagaaacttaaaaaatagaaaaattttaaaaagaaagtgcttggtaagctttcaagcactgtgcatacattatcccaatgcaagcatctcaaactagtatagtatgtcacttatacataccattccatgtgtgaaaatccttcatgtgctagaaggccatcctcaaatcctcattccaattttcagtctgaataaacctagtttatttaaaatttcctcctacagtctctttctcaatctctttttttaatcccttaatgatttttgtattttgtgacttttctctgatctattatttagctatctttgttactatgatgatttcacaagtgaccctcactttattaaataaagctatgtgaaaatagaatctgtataaattgtgtcatattacaaatccactaagagagctacagttccttttttttgttcttgagacagggtctcactctgtcacctaggctggaatgccatggtgcgatcacagctcactgcagcctcgacctccccagctcaaagaattctcccaccttagtctcctgagtagctgagaccacaggcatgcaccaccatgcccggttaatttttaaattttgttatagggatgagttctccttatgttacccaggcttgtctcaaacacctggctcaagcgatcctcctgccttggcctcccaaactgctaggagtacaggtgtcagccactgtggccagtccctagtgtttcttaaagatcctttgtagagaggaaaagggcattagaaaataacttatgtttatgagttcgtgctctactgctgatctgtaatatgaccttgttactgagcttctaagccctagtgtcccatctgtaaagtagaggctgtcaacccctcctgcagtggttcccaatggttggggtcatggggcacacttaaaaatgtgcaggagtgttttcagtccccacaataactgtgagtggttgttgctatttaatgaggagactgagtttaaggggagtgaagggcagggacataaataccctgcaatgcctggagcagtccctcttaactagcaattgtcctgccacaaaatgttggtagtgatgttattgataaacagataaagcaatacctttgatgccatttctacagctacctgacccccgacctctggaaggagactgtatttaccaagtctcccgatcaggaattcactgaccacctcgtcaagacccacaccagagtctccatgcagcggactcaggctccagctgtggctacaacatagggtttttatacaagaaaaataaagtgaattaagcgtaaaaaaaaaaaaaaagaaaatttctcctgataaactagtgagcactagatagcagaacgggagcactttatgatttaaaaacaaaaaaaaagctgggcatggtggctcacacttgtaattccagcactttgggaggctgaaatgggaggatcacttgaacccaggtgttcaagaccagctgtctctataacaaaatggaaaaaaaatagctggacctggtgaggtgtgcctgtatgtcccagctacttgggaggccaaggcaggaggatcgcttgagcccaagaagtcaaggctgcagtgagctgttgggattgcaccactgcactccagccttggtgacagagtgagaccctgtctaaaaaaaaaaaaaaaaaaaaaaacagggaaaaaaagaaagaaaaaaaaacgaaaacccattcagaatccctgagacttttctgccccgctaagataataattttaaaattgtttcctgcatgtctgtccaaataaaatttgaaattctcctgttatgtagaaaatatctttaaaatctctgatcagctcaccagccagataaggagacatctgttgattactttagaaatagatgagctgattttcattttgtctgtgtttctaaagtattacttggctttagtcaaatcaggtaagccatattcctagttgtaaattgtatcagatgtttctttggacgtagacgttctttgtctctttgaaggcctaagttaaaagaacttttctgctggctcttccttacacctgtctcctcccatctcagggcttcctttgccttgcagccccttctaggcactactaggggcgggcatccagacatgggcaacctggaagcccaacaggtgaacttatgatgttagagatcacagctartggataacatcttcctcttttctactgcctcccccactaagtgggcagtcctgagatacagtgtattctgattcttaggagcacggcacttggcagcaactcacacatgacatcctcactctgactcttcctccttccttctttcactgtctttgtccttaactcttcttccatgggattgtactccctaataaaataaaagaatataaactcactgcttcagacctgcttttggaagatctcagctaagacataagtgaagtggagaactgaaaccatcatttggttatttcagaccaatctcttacggagatcaatttggattaatttacaacacaggaagttaagtacacaagaacaatcatattgccaattggcaagtaaaatgagctgtcagcactgtccaaccatcataccacatttctcctataagctcactttcctattcatggagatatctgtttcatagaatatctatctccatgcctattactttcaactgacaacctctcttcaaattaaattgagaaagtagaaaccatcagatgggcacagtttcataatcttatcattagatccatgaacccatctgcatctgccctcacctcttccttctttcctgtttcatctgatgatgggttctttctcctacggttggccagttcttcaatatagatctaattccctttgctctcctcagggggttagttccttgttgttttccactttttcttccaccctctcacttcactgaattgttcccatctgtattcaaaatattctctcatctttaaaagacctcccttcatctcacattctcctccagctatttctacacttctgtatttcctatcccagttaagcttctctgaaggaaaagctgtaatccatgttcttaccttctatttactcctcaacccactttaattaggcttctgcctccatcacttcagtgaaactgcccttattgaagtcactaatgacttctctgttgctcaatctaatgatcattttttatggcttcattttaactcagcctcaagcagcaatcaacacaatgaaacattctttcctttgtataggccctttccatgccttccttttaaccctgctcacgtgctgttatttctccatctcctttgtgtgctcctccttttctttctgttgcttctgttgtcagtcctgtaggcttggtctagacctctcctgtcctcattacatacttaggcattctcatatacacccatgactcaaattacaccatttgcagatgactcacaaatgtatagcaacaaccgagacctctcccctgaactttatttccatgtagtgcttactaacatatctttgaatatcaaatgcacctcagtctcagcatgtctaaaaagccaactcagcccgggcaacatagggagaccctgtctctacaaaaataaaaaaattagctgggcgtggtggcacgygcctgtaatcctagctacaccagaggctgaggtgggaggatcgcttgagcctgggaagtcagggctgcagtgagccgtgatcacaccactgcactccagccagggtgacagagtgagaccctatctcaaaagattaaaaaaaacagaacaacaaaacattaaaaagccaactcggccagccatggtggctcatgcctataatctcggcactttgggaggccaaggtggccacatgacctgaggttaggagttctagaccagcctagccaacatggtgaaaccccatctctcttttttttattttatttatttacttatttatttatttatttatttatttattgagacagagtttctctcttgttgcctaggctggagtgcaatggcacattctcagctcactgcaacctccgcctcccgggttcaagtgtttctcctgcctcagccaacaagtagctgggattacaggcatgcaccaccactcctggctagttttgtacttttagtagagacagggtttctccatgttggtcaggctggtctcgaactcccgaactcaggtgatccgcctgccttggccttccaaagtgctgggattacaggcgtgagccagtgcgcccggcccgtgaaaccccatctctactaaaaatacaaaaattagcagggcatggtggtgcacacctgttatcccaactattcgagaggctgaggcaggagaatcacttgaacttgggaggcggaggttggagtgagccaagatattgccattgcacaccagcctgggcaacagagtgagacgccgtctcaaaaaataaataaataaaaataataaaaagccaactcactatttccacccctgccccacaccaactctgccccaacctggctgtctttcagtttttcctgttttagtgattggaatcactgtccatcaactcataaaagaaaaaacatgattaagggaaacactcccttaaacaatccatcgctaggttctatctttttacatatattaaatctattaaaaatatttactcaatctttctactttgccacaaccactgccaccagagtatgtcagtatctcttgcctggactactccaatttttgttcatccagcagctagaatgatgtttccaatccccaaatctcattatttcacccagttgcttaaactccttaaatggtttctatatattttagaataaaataagaaatccttaacatagcctataaaccctgcctgtttgctaccaactgattcttgctctccaactgattttcttttgctctttgtgttttcaacacattgactttcttttatttcctttccatgcacattcctaccacagtatcttaggaaatgccttttcctctgcctagaatgccttttctctagttagtgcctcttcagtcttccaattagtattatatactctctcctatgttttttgttttgctttgtttttgtctttttctttgtttgtttttgagacagggtttttctcctgttgcccaggctggagtgcaatggcacgactttggctcactgcaaactctgcctcctgggttcaagcaattctcctgcctcaacctcccaagtagctgggattataggtgtgcaccaccatccccagctaattttgtatttttagtagagacggggtttcactatgttgatcaggctggtctctaactcctgaccttcagtgatccacctgcctcggcctcccaaagtgctgggattacaggtatgagccactgtgcctggcctctcctatattctaagatacaaataatatgtgtaagagcatgtccaaagagttcacaggactttgaattaaagcagcggcttcagggattaaaagtcagaactgaatttgaaacattcctacaaggtaaaattactttaattgtatgtctattttgatggtggcagggaataagaggaaggttggaggtaatctccaaatgtttgagttgtttgacttaatatctagaggttccttgaaggaagatgacaaattaaagagaagaaataggtttacaagaatgactaccagttaatatctagcaaaattatacatatatattagttatttgacttagcaattacacttccaaggctctgatatggcttggctctgtcctcactgaaatctcatctcgaattcctatatgttgtgggagggacctggtggtaggtaattgaatcaygggggcaggtctttcccatgctgttctcatgttagtgagtaagtcttatgagatctgatggttccataagggggagtttccctgcccaagttcactctttgcctgctgccatccatgtaagatgtgacttcctcctccttgccttctgctgtgattgtgaggcttccccagccacttggaactatgagttctccattaaacctctttcctktgcaaattgcccagtgttgggtatgtctttatcagccacgtgaaaacggactaatacagtaaattggtaccagtagagtgaggcactgctgaaaagatactcaaaaatgtggaagaaactttggagctgggtaacaggcgagactgggacagtttggagggctcagaaaaagacaggaaaatgtgggaaagtctgaaactttctatagaattattgaatgactttgaccaaaatgctgataatgatatggacaataaagtccaggctgaggtggtctcagatggagatgaggaacttgttgggaactggagcgaaggtgactcttgttatgttttaagcagagacttgcggcattttgccctgccctagagatttgtggaactttgaaattgagagagataatttagggtatgttgcagaagaaatttctttttaaaaatattttgttatactttaagttccagggtccaggtgcacaacgtgcaggtttgttacatatgtatacatgtgccatactggtgtgctgcacccattaactcgtcatttacattaggtatttctcctcatgctatccctcccccattcccccaccccatgacaggccctggtgtgtgatgctttccgccctgtgtccaagtgttctcattgttcaattcccacatgtgagtgagaacacgcagtgttcggttttctgtccttgtgatagtttgctcaaatgatggtttccagcttcatccatgtccctacaaaggacatgaactcatccttttttatggctgcatagtattccatggtgtatatgtgccacattttcttaatccagtctatcattgatggacatttgggttggttccaagtctttgctattgtgaatagtgctgcaataaacatatgtgtgcatgtgtctttttagtagcatgatttataacacccagtaatgggatcactgggtcaaatggtatttctagttctagatccttgaggaatcgccacactgtcttccacaatggttgaactagtttacactcccaccaacagtataaaagcattcctatttctccacatcctctccagcacctgttgtttcctgactttttaatgatcaccattctaactggtgtgaaatggtacctcattgtggttttcatttgcatttctctgatgaccagtgatgatgagcattttttcatctgtctgttggctgcataaatgtcttcttgtgagaagtgtctgttcatatcctttgcccactttttgatggggttgtttgactttttcttgtaaatttgtttaacttctttgtagattctggatattagccctttgtcagatgggcagattgcaaaaattttctcccattctgtaagttgcctgttcactcttatggtagtttcttttgctgtrcagaagctctttagtttaattagatcccatttgtcaattttggcttttgttgccattgcttttggtgttttagtcatgaagtccttgcccatgtctgtgtcctgaaggtattgcctaggttttcttccaggatttttatagttttaggtttaatatttaagtctttaatctatcttgaattaatttttgtataagatrtaaggaagggattcagtttcagctttctacctattgctagacagttttcccagcaccatttattaaatagggaatcctttccccatttcttgtttttgtcaggtttgtcaaagawcagatggttgtagatgtgtggtgttatttctgagggctctgttctgttccattggtctatatctctgttttggtaccagaaccatgctgttttggttactgtagctttgtagtatagtctgaagccaggtagcatgatgcctccagctttgttctatttggttaggattgtcttggcaatgcaggctcttttttggttccatttgaactttaaggtagttttttccaattctgtgaagaaagtcattggtagcttgatgtggatggcattgaatctataaatttacttgggcagtatggccgttttcacgatattgattcttcctatccatgagcatggaatgttcttccattcgtttgtgtcctcttttatttcattgagcagtggtttgtagttctccttgaagaggtccttcacatcccttataagttggattgctaggtattttattctctttgaagcaattgtgaatgggtgttcgctcatgatttggctcgctgtttatctgttattggtgtataagaatgcttgtgatttttgcacattgattttgtaccctgagactttgctgaagttgcttatcagcttaaggagattttgggctgagatgatggggttttctaaatatacaatcatgtcatctgcaaacagggacaatttgacttcctcttttcctaattgaataccctttatttctttctcttgcctgactgccccggccagaatttccaaaattatattgaataggagtggtgagagagggaatccctgtcttgtgccagttttcaaagggaatgcttccagtttttgctcattcagtatgatattggctgtaagtttgtcataaatagctcttattattttgagatatgttccatcaatacctagtttattgagagtttttagcatgaagggctattgaattttgttgaatgccttttctgcatctattgagataatcatgtggtttttgtctttggttctgtttatgtgattatgtttattgagttgtgtatgttgaaccagccttgcatcccagggatgaagccaacttgatcttggtggataagctttttgatgtgtcgctggattcggcttgccagtattttaaggaggattttcgcactgatgttcatcagggatattggtctaaaattctctttttttgttgtgtttctgccaggctttggtatcaggatgatgctggcctcataaaatgagctggggaggattccctgtttttctattgattggaatagtttcagaaggaatggtaccagctcctctttgtacctctggtagaatttggctgtgaatccatctggtcctggactttttttcgttggtaggctattaattattgcctcaatttcagagcctgttattggtctattcagggattcaacttcttcctggtttagtcttgggagactgtatgtgtccaggaatttatccatttcttctagattttctagtttatttgcatagaggtgtttatagtatagtttgtatttctgtgggatcagtggtgatatcccttttatcattttctattgcgtctatttgatgcttctctcttttctttattagtctttctagcagtctatcaattttgttgatcttttcaaaaaaccagctcctggattcattgattttttgaagggatttttgtgtttctatctccttcagttctgctctgatcttagttatttcttgccttctgctagcttttgaatttgtttgctctcgcttctccagttcttttaattgtgatgttaggatgtcagttttagatctttcccactttctcttgtgggcatttagtgctataaatttccctctacacactgctttgaatgtgtcccagcgattccggtacattgtgtctttgttctcattggtttcaaagaacatctttgttctgccagtagtcattcacgagcacgttgttcagtttccgtgtagttgtgtggtgttgagtgagtttcttaatcctgagttctaatttgkttgcactgtggtctgacagacagtttgttttgatttctgctgttttacatttgctgaggagtgctttacttccaactatgtggtcaattttggaataagtgcaatgtggtgctgagaagaatgtatattctgttgatttgaggtggagagttctgtagatgtctattaggtctgcttggtgcagagctgagttcaagtcctggatatccttgttaaccttctgtctcattgatttgtctaatattgacagtagggtgttaaagtctcccattattattgtgtgggagtctaagtctatttgtaggtcttaaggacttgctttatgaatctgggtgctcctgtattgggtgcatatatatttaggatagttagctcttcttgttgaattgatccctttrccataatgtaatgatcttttttgtctcttttgatctttgttggtttaaagtctgttttatcagagrctaggattgcaaccccttgcagaagaaatttctaagcagcaaagcattcaagaggtgacttgggtgcygttaaaggcattcagttttataaagaaagcagagcataaaagttcagaaaatttgcagcctaacagtgygacagaaaagaaaatcccatttgctgaggagaaattcaagctgcctgcataaatttgcataagtaacgaggagccaaatgttaatacccaagacaatggggaaaatgtctccagagcatgtcagaggtcttcacagcagccccacccatcacatgcttggaagcctaggaggaaaaagtggttacatggactggacccagggtccccgtgctgtgtgtagcctagagacttcttgccctgcattccagcccctccagcattggctgaaaggagccaatgtagagcttggactgtagtttcagcaggagcaagccccaagccttggcagcttccatgtggtgttgagactgcaagtgcacagaagtcaagaattggggtttgggaacttctgcctggattttagaagttgtatggaaatgcctggatgcccaggcagaagtttgctgcaggggtggggtcctcatggagaacctctactagggcagtgcagaagggaaatgtggcatcagagcccccacacagagtccctactgggacactgcctagtggagctgtgagaaaagggccaccatcctccagaccccagaatggtagatccactgacagcttgcaccatttgcctggaaaagccgaagacactcaacatcagcccatgaaggtagccaggagggaggctgtatcctacaaagccacagcagtggagctgcccaagaccatgggaacccacctctttcatcagcctgacctcgatgtgagacataaagtcaaaggagatcattttggagctttaagatttgactgccctgctgaatttcagacttgcwtggggcctgtagcccttttgttttggccaatttctcccatttgggatggctgtatttacccaatgccrgtacccccattgtatgtaggaagcaactaacttccttttgattttacaagctcataggcagaagggacttgccttatcttggatgagactttggactgtaaacttttgaattaatgctgaaatgagttaagcttttgggggactgtcagggaggcatgactagttttgaaatgtgaggacataatagttgggtggaggcaggggtggaatgacatggtttggttttgtctcctctctcaaaaaaaaaaaaaaaaaaatttccaggcatggtggctcacccctgtaatcccagcactttgggaggctgaggcgggcaaatcacttgagggtcaggagttcgagaccagcctggccaacgtggcaaaactccgtctctactaaaaatacaaaaattatccaggcatggcacatgcctgtaatcttagctacttgggaggctgaggcatgagaattgcttgaacctgggaggtggaggcttcagtgggccaagatcgtgccactgtactctagcctggatgatggagtgagactgtctcaaaataaataaataaataaaaagttggtcatatctaaaaatactttcacagcaacatgtagactggtatttgacgaaatatctaggcaccatagcctggccacaagtackcccctagttctatctggaaaatgctaattcttcctgctcatttagagcagtgaccctatcttcccttctcagggtcagcataaacccagctacattatgctgtcactccacatagctattgactttgatgttcagrcccagtagcactgtagaggacaagtctcccacagagagtgctagctcttagtaaggagaggcaggccacttctgcggttctaaaggtttagctaaggctaggtaacacaaatcttcagaggcactcaaccagatttctccatcccatgtttcagaatcccagatttttcccaaccaagattctgacattagcataacagacttctttggttaagtgtttttgagctrggcaattctaactattcaatcttgaatctggttttcagctttttctgctactcactacaggagataagagcctctttctaacaaggctctcttgccgtcacaattaattttgccttcagcttttcattatatatatatccctctatgaagtgtaaatataacttattaacaagccagtggtctcacatgcattgcctccttccccatgcctgaattattacaccaaccgaggcacccccccttcaccagaacatcctctcaagttaccactggtgacagttttggcaactgggccaccaccttgtattacagatgatccatgatccaatttctaccttgtgtgattttcctttagtcagaagaacttcctgtaacattttttttttgagatggagtttcgctcttgttgcccaggctggagtataatggtgccatctcagctcactgcaacctctggctcctgggttcaagcaattctcctgcctcagcctcccaagtagctgggattacaggcatgcgccaccatacccagctaatttttttgtatttttagtacagaaggggtttcaccatgttggccagacgggtctcaaacccttgacctcaggtgatmcacctgccttggcctcccaaagtgctgggattacaggcatttgccaccatacccagctaatttttttgtatttttagtacagaaggggtttcaccatgttggccagactggtctcaaacccttgacctcaggtgatccacctgccttggcctcccaaagtgctgggattacaggtgtgagccaccaagcccggcccctttaacatttcttgttgtgcagktctattggcaataaactttctcagcttttatttgtctgaatctatattttaccttaacttttatttatttttattttttaaattttattttatgaatatctaatctgccagcattttagaaatttgtttctattttctaaattttattttatgatactttcacttttaaaggatattttttctgggtatatagttccagattgacagtttctgtcccatttcaatactttatgttgttacatttttttctggcttgcattgtttatgaaaatggccctgtgtgtaatatgtctgttttttttcctgctgcatttagactttgtttatacacttctgttcggcaatgtgtttattatgtgccttggtttgggccatgtgcttgtgtgtgtgtatatatgtgtgtatttattgggcttgatatttgttgaacttcttggatctgtgggtttatagttttcaaaaaattttaaacttttccaaccattatttctctactccactgagatttgaattacatgcatgttacactgcttgatattatccacargycattgtaattgttcattatcttttgttctttttcctctctgagcttcactttgggtgtatttcagttgactatgtcttcaagtttacccgcctttccttctgtagtatstaatctgttaagcccattcagtgaattcttttatttagaatattgtgttttagtttccattttactctttttagaatttttttttctgtattatgtttgtatttctctttaaatttttgaactgctttaaaattcctgcctgcacctgttatttctggatgatttatattagcttatttttctcctgattatgggtcacctttatttcttttccttttttttttttttttttttgacagagtctcgttctttgtccaagttggagtgcagtggtgcgatctcagctcactgcaacctccgtctcccggttccagtaattctcatgcttcgttctcctgagtaattgggattacaggcatgygccaccacgcctggctaatttttgtatttttagtagagacaggttttcaccatgttggccagggtagtcttgaattcctggccccaagggagttgcctgccttggcctcccacagtgctgggattacaggtgtgagccatcacacctggcctatgggtcatcttttcctccttccttctatgtccagacattttgattggacattagacattgagattttatgatctccaatatgtaaattttgatgtctttttaaaaagaatgctaagctattttgagatcagcttgatacttttgaggcttgttttaagttttattggggtgaacccagtactttgtagcctttactctaggactagttgaattctactactatggtatgaaccttttactactgtggtatgagccttctcaggtttctatcatatgctgtaggtgttcaataatgtctctgttctttagtttattgttacttgaatatctctctgctcttctgtgggttttgagaatcattcagcttgcaggccttcagttgctgttttccagccttatggagttttactctacgtattcaaaacttagtattcaacaacagactcagtcggttcccatgcagtttattgaaaatctttttctgtgtggccccctctgctttggtactctactctgaaaattccagccatttcagccttccttcaattcagtgagacaactgtgctctttctccctgcttcatattctgtagagtacccccaagtaaaagaaatggggcaatcatagggcttttctcatttgtttccctttccttgggggtcagagatttgttatgcttaatgtccaaattctgaaaacaattgtttcatatattttgtccattcttctaawtttttttaatggcagtagggcaagtccaatactagctatcccattatgatggaagtggaagttttgtagagtaagtgttttgatagatatgggcacataattaatccaaccacataggtcttagagcagtcttgcaaaaagactttctagagaaaagaatgcctcctctaaaagagaagccaaaaggagaagaggtaaaggatattttaggatatttcagataaggaagtagcatacacagaggcagagaggcatcctagaactatcaaaaatatagctgaagcctacaataagacttgcagagaagcgaggagagaaataaagagagattatttaggaggacatcaatcatgaatattttccttttgtatttaatatagcaaagtggactaaaaaaggatgcttaattaaggtataggcagtgatttgaacattgtaatttmttarttacagtgtaattgtaaagtgacggttatgaaaactatatagcagtgagggggtgtttataatatgttacatgaaaacatcagaaggtaaacatttgtacatatactaatatcatattttttaaaaaaatcagatgcataggaaataacatcataaggaaatgtaccaaaaaaattgtacaaatgtggtagaaaatgaataatggttggccaggagcagtggctcatgcctataatcccggcactttgagaggccgagatggatggattgcttaagcttagtagttcaagatcagcctgggcaacatgttgaaaccctgtctccaccaaacaaaatacaaaaattagccgggcatggtggtgtgtgcctgtgatcctagctaattgagaggctgaggaagaaggatcatttgaacccaggggggcagaggttgctgtgaactgagattgcaccactgcactccagcctgggtgacagagcagaccctgtctcaaaaaaataaatagatagataaataaataaataaataaaaataaagaataatagtagctgggcatggtggcatatgcctgtaatcccagctactcaggagactgaggcaggaaaatcacttgaacccgggaagcgaaggttgcagtgagaagagatcgcaccactgcactctagcctgggtgacagagtgagactctgtctcaaaaaaaaaaaaaaaaaaaaaaaaaaaaaaggatagtgaatatccactaaaataaataaaaataaagaatagtggatattggtatgatccttctcaggaaagagcacagacaaagcacagaagtttcactgaattgaagagagaaagagatcaaaagttagggaagctgagctggctggaattttcagagcagggtaccaaagcagagggaactacacagaaaacggttttccctcactttttaatgtttcagatacagacacacattggagatattgtagattcggaaccagaccactacaataaaactagatctcattaacgcaagacacacgaattgtttggttttcagttatgtttagactatctggtagtctattaagtgtgcaatagcattatgtctaaaaaaggctaatgatcatctgaggtttcagcaagttgtaatctttgcttgtggggagggtcttgcctcaatgttgatggctgctgactgaccagagtggtggttgttgaagggtggggtggctgtggcaatttcttttagggagaccagaatgttkactgcattggttgactcttcatttcatgaaagatttctctgtagcatgttatattatttgatagcattttacccacagaagaacttttaaaaaaaatttggagagatggcagctatagcctcataaaatgtatttcttaattagtaagacttgaaatcaaaattatcccttactccatggactgcagactggatgttgtattagcagacatgaaatcagcgctcatcttcttgtacatctccatcagagctctggggtgactacatgcattgtcaatgagagtaatactttgaaagagagttttttttttttctttctgagcagtaggtcttaacagtgggcttaaaatattcagtaacccacgctataaacagatctgttgtcctttaggctttgtttttccatttatagagcacaggcagagtagatgtaacataaattttaaggccttaggattttttgratgataaatgagcattggcttcaacttaaagataccagctgcactggcctctaataagagagccaacctgtcctgagaagctttgatgccagacattgacatctcttctctagctaggraagtcctagatggcatcttttttcaatagaagactgttttatctacattgaaaatctgttatttggtgtagccacctttatcaatgatcttagctagattttctgagtaacttgctacagcttctccattagcatttgctgtttcaccttgtacttttatgttacggagatggctttttcyttaaaysacatgaaccaacctctgctagttttgaacttttctgcagttttcttacctctctcaaccttcrtagaattgaagagagttagggccatgttctagattaggctttggctcaagggaatgttggagttgatttcttatttagatcactaaaacgtttcctatatcagcaataaggctattttgcttttgtaacattcgtgtgttccctggaatagcacttccttcacaagcttttcttttgcatttacaacttggctaactggtgcaagaggcctagctgtcagcctatctcactttttgacttgccttcctcgctaagcttaatcatatctagcttttgatttaaagtgagagatgtgtgactcttccttttacttgaacacttagaggcaattgtagggttattaaccagcctaattgcaatattattgtgtctcagggaatagggaggccagaggagaaggagagaggagaagggaatggctagaaagtggagcagtcagaacacacacaaaatgtgttaagtttgctattttatacgggaatggtttgtggtggtcctgaaagaattacaatagtaacatcaaagatcactgatcacagatcatcttaacaggtaataataatgaaaaagttggaaatattctgagaatatcaaaatgtgacatgaagacacaaagtgggcacatgctgctggaaaaatgacattgatagccttacttgatacagggttgtcaccaactttgcattgtaaaagtgtactatctgtgaagcacaaacaagtgaagtgcaataaaatgaggtatgcctgtattctgtgctttgatactaaaaagggtgttgttgaggaaaatgtcaatgcatatacatacgtgcatacctacatacatacaactcttcccttcagtgctttcgttttctactctgtaaagtggaaattttgatagtatgtctcttattttgtgtgtgaattaaatgggatataatgtatttatataagcatttagcagcacaatccatgatccatattcagggtgtgtattagtccattttcacaccactgataaagacatacctgagactgggtaatttgtaaygaaaaagaggtttaatggactcacagttccacgtggctggggaggcctcacaatcatggcagaaggtgaaaggcatgtcttacatggcgacagacaagagagaatgggagccaattgaaaggggaaaccccttatgaaaccatcagatctcatgagacttactaccacaagaacagtatggggaaaactgcccccatgattcaattatctcccaccgggtccctcccacaacacatgggaattactggagctacaattcaagatgagatttgggttggaacacagccaacccatatcagtgtgtcasgttttttgtttttttttttcaccaggactactgttgcattcatgtgggatatttattatgctgtattatgcaatattcctgggtcccaatcactatgtacatgtagtcatagtgactataaaaaaatgttatcacatacttccaaatatttttggctgaaaactacatgtgaaagagttatgaattaaaaagtataggaatagatatatgaaggtaagggttctttcttgctctcaattctttggtaaaacagaatccttcacatgaaaaacaaaacaaaagcaatgtggtgtggtgggagatgcacagaactgggaatgagaagacttgggatcttggtttttctctatcgtaagcaaattccttagtctctgtgggttaatttccttcttgtagaatgaggccgtggtccaagctaccatcaagagtcttcctagctctaagagtggattatttttatgcattgaaggaataatttttctgacatgcctttttttatacagcaaaggtggacattcagaccagttttgcaacttgtaagtcacagaggggaggaatttagattctatcaccctttctcaaatttagatgctatcagataatccagaggtcagcctcccgagtagctgagattacaggcgtgtaccaccacaccaggctwtttttttttttttttgagatggactttcactcttgttgcccaggctggagtgcaatggcgcgatctcggctcactgcaacctccacctcctgagttcaagcgattctcctgcctcagccacccgagtagctgggattacaggtgcctcagccacccgagtagctgrgattacaggtgcccgccaccacgcccagctaattttttgtatttttagtagagacggtatttcaccatgttggccaggctggtcttgaactcctgacctcaggtgatccacccacctcagcctcccaaagtgctaggattaccacatccggcccagctaatttttgtgtttttagtagagatgggttttcaccatgctggccaggctggtctcaaactcctggcctcagatgatctgcctgctttggccttccaaagtgctgggattacaggtgtgagccactgcgcccagccagtctacctttaatactaataacagtgaaacagtgaattcactaggatcccaaacttctcatgtccacccttcctatggggtcctggatgaagtttccttcctgctgctgctactccaggtgtaccttactgctctggcacttgctgggctcatgccaacactgttgctttatcccttactggtatcactggcctgcctgggaatggaaaagttgtatttggttcacaaagaactttaaaacgtcttccctctggctggagtgaaatgcatttcatagtgattcagtgtcctaggccaaacaactcctttcaaatgatgaacttcagcaccaccctgactcatgtgtctgaactctttcttacctggggatgattttaccccatataaaaaagaaatgatcattatttcttcccttcttcttttctttttttttttggtttgttcctaggactgaacacagactaaatgtctaatcaatgtttatttgaataaatggataaatccatgaaacataatatttaggtaacataggaaaagtcgtgtagtgcagcctttatgtatttaaatatacctgtgtaatacatttgcacatgtttttagacattatgatttattggggatatgtaatttttaacaaagtataactatacctgtgtttcgaaacacttcttattgaagaatgaaatacaaatctttttctttttcttttttttttttttttttttgagataggatctcactctgtcacccaagctggagtacattggtgcaatcttggctcactgcaacctccccatccatcgtgatccaggttcacacgatcctcccacctcaagcctcccaagtagttgggaccacaggcatgtgccaccactcccagctaattttttttgtgtttttggtagagatagaggtttcaccaggttgcccaggctggtctcaaactccacccaccttggtctcccaaagtgctgggattacaggcatgagccactgtgcccaaccgagatacagatctatgttaataaaatgacatgaagaacctaggtcaaggagggatgaatccatatcgctctctctgtatctagttagctataccctctcaactcaatctctgtctctcaaaacttttttttttttttttgagatggagtcttactctgttgctcaggctggagtgcaatggcacagtctcagctcactgcaacctccgcctgccgggttcaagcgattcttctgcctcagcctcctgagtagctgggattacaggcacccgccaacacgcctggctaatttttgtatttttagtagagacggggtttcaccatgttggccacgctggtctcgaactcctgacctcgtgatccacctgcctcggcctcccaaagtgttgcgattacagccaccacgcccggcctgactcaaaacgttttcttcacatttttagtattagtaatgacaaggagggacacacacagtttaataatttattataaatatatggtatctctccaaacactcacagaatgtattaggtgatccatactaggtctctcaattattcttgtgactaactgcttggatgaccacgaggaacactgtgctgttattggagactgtgtgaatagagaacccagagtggtgcagccacatgcagcaaccctagcatacatttccaaaaattttatggacatatttttctatcccctcatttgaaaaatcatagagcacaactctcaggttagatcactatcatatcttagcattaaactgggagtctgctaaattattctatttaagaattttgatcattttaacaataaaaataatgtactaatagtgtgtcttctcagaaattgttttctttcttttctttttttttttattaagagacagggtcaccctatgttgcctgggctggtctcgaactcctgggctcaaaacaatcctacaatctcagcctcccaaagtgctgggactccaggcatgagccacactgcctgattcagaaatctttttgaagatatttttaatagagtcattttagtctacaaagaatttcattatttcattgtgtttctacattaacccagtgtataggatctgcaattctcacttcatcaaattgagaactgaggatcagcgagggatagcaacttacccaaagtcacacagctatttggggatagacctaggattccaactgctgcttttaattgcaataatcttttcattatgctactttttataaaagttagaaataagttgcatgtgccagagagaatttcaatgacctcataggtgtgtatgaaatcatgagctgtttaatgatattacataaaagctcaaaagagcagaaaacccacccacggatatcagaagggtccttctgggaaatttaattttattgtactttatagtttagaaaatttattttattattatataattggtttattgactcactcattaattcaccatacatttttctagtgttcatgattgataaggcatttacctgaacagtctgtgactggcaaaaatgagtcagagacaatcactggcatcatgaaatgaactaactcagagtccacaaggaacaataatagcagacagaatgttataaatgccataccagaggtgtgaacataatgttatgagaaattagcagagaaacacgagaggcaacataatttgaattattgtccatattaaatgtgtatcactcttgtagtaataataaaagattatttgttgtttaaagaagagatattattaatttcatggtaggaaaacaatggtataaaattggccatgccatattgcccaaagtaatgtatagattcaatgctatccccatcaagctaccattgactttcttcacagaattagaaaaaaactactttaaatttcatatggaagcaaaaatgagcccatatagccaagataatcctaagcaaaaagaacaaagctagaggaatcacactacctgacttcaaactatactacaaggctacggtaaccaaaacagcatggtacttgtaccaaaacagatacatagaccaatggaacagaacagaggcctcagaaataatgccacacatcactattcacaatatcaaagacttggaaccaacccaaatgtccaacaatgatagactggattaagagaatgtggcacatatacaccatggaatactatgcagccataaaaaatgatgagttcatgtcctttgtagggacatggatgaaattggaaatcatcattctcagtaaactatcacaaggacaaaaaatcaaacaccacatgttctcacttataggtgggaattgaacaaagagaacacatgggcactggaaggggaacatcacactctggggactgttgtggggtggggggaggggggagggatagcattaggagatatacctaatgctaaatgacgagttaatgggtgcagcacaccagcatggcacatgtatacatatgtaactaacctgcacattgtgcacatgtaccctaaaacgtaaagtataataataataaaataaaatttaaaaaaataaataatgtcacacatctacaaccatctaatctttgacaaacctgacaaaaacaagcaatagggaaaggattccctatttaatacatggcgttgggaaaactggctagccatatccagaaaactgaaastggaccccttccttacaccttatacaaaaactaacccaagatggattaaagccttaaacgtaagacctcaaatcataaaaaccctagaagaaaacctaggcaacaccattcaggacataggcatgggcaaagacttcatgactaaaacaccaaaagcaatggcaacaaaagccaaaattgacaaatgggatctaattaaactaaagagcttctgcacagcaaaagaaactatgatcagagtgtacaggaaaaaaaaaagaaagaaagaaaagaaaaaagaaaaaaggtttgtatttcattcttcaataagaagtgtttcaaaaaaaatgtatagttatactttgttaaaaattacgtatccctacagaatgggagaaaatttttgcaatctacccatctgacaaaggactaatatccataatctacaaagaacttaaacaaatttacaaaaacaaaaacaaaaaaaaccagccccaccaaaaagtgggtgaagggtatgaacagacaattctcaaaagaaatttatgtggccaaaaaacgtatgaaaaaaagctcatcatcactggtcattagagaaatgcaaatcaaaaccacaatgagataccatctcacaccagttagaatactgatcattaaaatgtcaggagacaacagatgctggagaggatgtggagaagcttttacactgttggtgggagtataaattagttcaactattgtggaagacagtgtggcaattcttcaaggatctagaaccagaaataccatttgacccagcaatctcattactgggtatatacccaaaggattcaaaatcattctactataaagacacatgcacatgtatgtttattgtgcactgttcacaatagcaaagacttgaaaccaacccaactgcccatcaatgatagactggatacagaaaatgtggcacatacacagcatggaatactatgcagccataaaaaaggatgagttcatgtcctttgcagggacatggatgaagctggaaaccgtcattctcaagctgacacaggaacagaaaaccaaacaccgcatgttctcactcataagtgggagttgaacaatgagaacacatggacacagggaggggaacatcagacactggggcctgttgggggttggggggctaggggagggatagcattaggagaaatacctaatgtagatgatgggttgatgagtgcagcaaaccaccatggcatgtgtatacctacgtaacaaacctgcacattccgcacatgtatcccagaacttaaagtattgaaaataataataacaataaataaataaataaataaataaataaataaataaataaatagtggccatggagagacaggcatatataaacacaaagttcttgtttctttgcccactgagttaacaggagaaggaaaagaagccgccttctctggtaaaattccaaaaatgctgtcaccttgagaaaatcagttttcagttaagataagtaaaatgaagaatttttagggctgcagggcagggggtggggcagagtgggtcttggctactatcttgcacaactccccattttaaagttgaagaggccaggtgcagtggcttacacctataatcccggcactttgggaggtcgaggcaggtggagcacttgaggtcaggagttcaagaccagcctggccaacataacgaaaccccatgtctactaaaaacacaaaaattagccgggcttgtggcacacgcctgtaatcccagctactcaggaggctgaggcaggagaatcgcttgaacctgggaggtgaaggctgcagtgagccgggatcgcgccactgcactccaacctgggtgacagagtgagactccatctcaaaaaaaaaaaaaaaaaaaaaaagttaaagagactaaggcataaataagtaaagatacttgctcaagatcacataatcaatcaaaatagaaagggaactcatacttagatctccagaccccacactgctctcattgaaatatgtagaataccatctgaggcaaagagttaggttacccttattaaatatctacagttggccggcacggtagctcatgcctgtagtcccagcactttgggaggctgaggcgggcagatcacttgaggtcaggagttcgagaccaacctggccaaaatggtgaaaccctgtctctactaaaaactacaaaaatgtaatcccagctacttgggaggctgaggcaggagaatcgcttgaacctgggaggcggaggttgcagtaagccgagattccccccttgcactccagcctgggtgacagagcaaaactccgtctcaatagaaagaaagaaaaaaaatcgacagttatgcctcaaaattaaattaacaacactggttacttaatgttaccaggatgatatctattatatatacaagaggtgtcatatatatatgtaggtccttttggatccactttcaaaatatatatatgtctacctgacatcttgacacttagatatctaatagatatttcaaatgtaatatgtccaaaactgaatttttgatctttcctccccagacctgcttcactctcagtcttcctcatttcttttgatggcagctcctccatccttctagttattcaggctaaaacccttggagttatctttgatgcctctctttttatcctactgcataccgattttgtcaacaaatcctgtggaatctgtcttaagaatatatccaggaactgaccatccttaccaccttctctactgtgaccaccttaattcaatggacagtcatctctctcttggattactgcaatagcctctgaaccaaactccttgcttctacctttgtcctttgttttgttctcaaaacagccagaatgagctttttaaaatattaagtcagatcatcacttttctgactcccatctaaaatggacattcattttgtttagagtaaaagctgaagtcctttcagtggcaaaaatatttatagcagcattactcataatagccaagaagtggaaaaagctaaataaacatataaacaaaaatgtgttgtatccatacaatggaataatatttagcattaaaaaaagtgaagaactgatatgtgttacaatttggatgaaccttgaaaatattatgaggctgggcacggtggctcatgcctgtaatcccagcactttgggaggctgaggcagggggatcacctgaggtcaggagttcgagactagcctggcctaagtggtgaaaccccgtctctactaaaaatgcaaaaattagctgggcttggtggtgggtgcctgtaatcccatctactcgggaggctaaggcagaagaatttcttgaacccaggagatggaagttgcagtgagctaagatcacacaactgcactccagcctgaacaacagagtgagactccatctcaaaaaaaaaaaaaagaaagaaaagaaaatattatgttaagtgaaagaagccagtcacaaaagatcacacattttataacactatttatatgaaatgatgaaatgtccagaataggcaaatccatggagacataaagtcaattaggaactacctagggctagaggggttggaggaaacagggagtgactgctaattgctatagggtttcttttagggatgataaaaatgttctaaaatggatcgtggtgatgatacgggtctctgtgaatggactaaaaccattgcatggtatagcataaatgggtgtatgttatggtatgtgaattacatttctatattacattgctataaatctgttttgtaaaaaagagaggtaatagaaaggaaggaaagaacataataaaaggggcagtaataataataataatagtaataaggccccatattaggaaggaacttaatatctatgagttgacagatatcatggtacctatgatattagagagaaggccaatatccttaaggtgtacgaacaagttggaaaataagctgcagtcagataaggaccatagtatgaggattttaaattttaccagaacccccaaaagaaagatttagagggatttatgcaagcaaatgacataatcagatttccatttaaaaaatcattctgtctggctggcgtggggagaattagaagtgggaaagtgtagaaactgggagagcaattaaaagttattgcagtggactaggaagaaaggatggttgaaatgaaggcagatataagagatggactttggtgtctattttggagacagaatcagtgaaagttggcaaactgagtggacgtacggcatgaaggatatgagtagatggagatcccacttgcttagattgagaaaccctggggaagagtcattttaggtgtagttctggctacactaaatttgagatgcgtttgaaaataaccctgtagacacacacatcaacagtttgatatatggtttagattgggtttaaatattggctctgccatttactagctacgtgacactgaaaaccattattatttttccggattccttcatctgtaagatggagataacataacctgcagtagccaactaataatctactggcttattacagcttgttggtttaaggcacagactctgaacctccaactgcctgcatttggatcctggctttgacatgactatagttgtatgatcttggagaagttacttaatctctttaagtctaattttcttaatcccaaaatggggataataatagcacctatctcatagggttgttaaataaagatacgcattagataatatatgcaaagtgcttggggctggcacttagtaagcagatataagtggtagttaatgatattatctcactgggttgacatgaagagatgagataatacatacgaaaggaaccagcacgtattagatattcaaagaatgttactaaagtttccttcctcatttttcacctgaattttgtcttaattaaactttccacttttatttggactaggttaacctagacattttctcagtatggtaaagcccagtaaattgcccaccagtttaagatgggagataaaggccaatgaacattgccgcaggagcagaaaatgaagaaaagaatgtctaaatggggaggcacaatccaggttggggagacagaatgcaatcagcaaatatgaacagtggaccagaccatatcattcctgagaaaagtgggattggtttggaacattggctgctatgagatgaaccccacagctgtgtgttttatctaatgaataacaaagaagcaggcctcttcaaatgaggacacgacttcaacaatatgtaagagcatcatgcactcctcctgagagctttgtgtgtgtgccatccccactggtccttcattcattcactcacttgcgcatttgtttattttctagtttattcaacaaatatttactgagcaccaggcatcagggagacagaagggggaaaaaggtgaatgttcttagctcgatggagtgtgaaatatagtgggggaagacaggaaaggaacgacaagtagaatatacagtgtcaggccgggcgcagtggctcacgcctgaaatcccagcactttgggaggccaagacaggcggatcacctgagatcaggagttcaagaccagcctggctaacatggcaaaaccccgtctctactaaaaaatgcaaaaacattagccaggcgttgcagtaggcgcctgtaatcccagctactccggaggctgaggcaggagaaccacttgaaccagggaggcggaggttgcagtgagccgatatcatgccattgcactccagcctgggtgataagagtgaaaccctgtctcaaaaaaaagaagaagaagaaggaatatacagtgtcagataaattctatggagaaaaagaaagcaagggcatcaggggagatgcagacacggtagcaaagtaaaagtttgaagaaggggagcactccaacagagggaacatttcgtgcaaaggccctgctcattgtatctctgtcattctgaatcccattttcccatcctccaaaatttaaagaaatagaaaagtttcaccgggctgaggaaggtaatgttcttagtattagtttctagggctgctgtaacaaattaccacaagttgggtaacttacaacaacagaaatatgttatcttacagttctggaggccagcagtccaaaatccagcagggccacattcctccagggaacttctggaaagggctcattccttgccaatttcagcttccgggggttgcatcagcatttctggctgcatctctccaatctctgcctctgtctttacatggccttctttgtgtgcccatgtcttctcttctgtctcttataaggacacttatccttggatttagggtccacctgagtaattcaggatgatcacatctaaagatccttaagccaggcgcagtggctcatgcctataatcccagtgctttgggaggctgaggcgggtggatcacaaggtcaggagatcaagaccatcctggctaacacggtgaaaccccgtccctacttaaaatacaaaaaattagctgggcgtggtggcacgcacctgtagtcccagctactcgggaggctgagaaaggagaatcgcttgaacccaggagacaaaagttgcagtgagccaagatcgcaccgctgtactccggcctgggcgtcagagctagcctccgtctcaaaaaaaaaaaaaaaaaatccttaatttaattacatctgcaatgactcatttccaaataaggtcatagtcacagattctggccattaggatatgaatagatcatttggggggctaccattcaatccactacactcaataaaggcgtttcagttcttctttgtccatgttatggactttctcacgttcctcatcttttttctctaagttgaaaagttgtctttgagaaaagttttttcttttcttttcttgtttcttttctccctctctctctctctccctcccttcctccctctctctctctttctctttcttggagtgtctatacagacataagtgaggtagatgactgagaattatctgagatagagactttcatatggccacagccattaatatggttcaaggacaaaatcatgttggcatctgttcgggaattgcaatgagtaagtacgttaaaatttcagaataattatttctctgttggccaaacaggaaatggataaatataaccaatgttcacaatttggaaaattgaacaaattcttctgtttaccccttttcccattcataccatacatagctaagttatgttgccatccttattcatactttcatttatactttttctactttttgactgtttaaatctttgttgcagtataacatacgtgcaatcggtacaaaagctttatgttcacatattaatctcacactgtttttacatatctgtttaaccatgtaatcatcattcaaatcaaacattcagaaggcttcttcccacttaacaatcccttccccaaaggtgaccacatagtatgcactcctgtgtaaatttctttttttttttttgacatatgtctgaaagatgcatccaagcccttttgtgtagcagtggtttacttttttcagtactgcatagtatttcactgcgtatcactgtatgatatatatttattctaatttctgttgtttccatttgtgagttatcatgaataaagctgctatgaaccttattgtacaagtcttttggtagacaaatgtcatcatttttgatggccgtatccctagaagtggaattactgggccatcgaatagacataggtttggttttagtagattttacccaagagttttccaaagtagctataccaattatctctccagttggtccatatcttcaccatttgatattgtcaagcttccaaacgttagccattctgatgggtatatattggtgtggagtggtatttcattgtggttttaatttgcatttccctaatgactaatgatgttgagcactttgtcatatgtgtatcggtcacttgtatatcctcttttgttaactgcctattcaagaattttgccccccccttttttttaaaaaaaaaaaaagaccacatctttgcttgtctgtctttttcttatcggtttgtaggagttcttttacatactctgaatatacatccttttagtgaatatcctttttggccatgtattgttccaatctgcggcttaccttttcattttcttaattttatgttttaggggtcaaactttttttgtaaagagccaaataataaatattttaggttttgcaggtcatgtggtctcttttgcaactagtcagctatgccatttagtgcaaaagcagctacacacaatacgtttactgaataagcaaaaactttatcattcttcttttgattgtttttcggccatgtaaaaatttaataattattcttagctcacatattgtacaaaaacacttgacaggctggattaagtttatagtctgatatggttgggctatgtccccacctaaatcttattttgaattgtaattcccataacccccatgtgtcatgggaggtaccaggtggagataactgaatcgtggaagcggtttcctccatcctgttctcgtgatagtgagttagttctcacaagatctgatagttttataaggagcttcaccaccccctccacttgctctgcacttctccttgctgccaccatgtgaagaaggaygtgtttgcttccccttaagccatgattagaagtttcctgaggcctccccagccctgtggaactgtgagtcaattaaacctctttcctttataaattactcagtcttgggtatatccttatagcagcgggagaacagactaatacacagtccatagtttggcagctctggtgtattttataaatacaaattatgaattttaatgaatttcagtttatccgtttcttcttttgtcatcaatgcttttttattactatttaagaaatgtttgcctatcccaaaatcatgaatatattatccttcatcttattctagaagtttcattttattattcatgtttatgtctatgatccatctgggattaggtgttatgaatgatgtaaaatacaggtttcacacatgtgcttctatgtacttaagttattatacatctttttcaattttattatgcaactatgacttatctgttcgttgaagctttccctgatacccttaccttgtgcttgtaactttcctctagtcattctttcaacaactactttttgaagccttattattatgtaccatgttaggaacatggtatggtttgtgtctgaagatatgtgtatttacttgctcatttaatcattcatcaaatttcatgatttcatcaaatttcatgaagaaaattatagttttttgaagaaaacaatttaaactttacaatgaaatatgataatattgcaagtattggttcacatgtttttctttttttttttgagacagagtcttgcactatccctgggctggagtgcagtggcgtgatctcggctcactgcaacctctgcctcctgggttcaagtgattctcctgcctcagcctcccaagtagctgggattacaggcgcctgccaccacacccaactaattttttgtatttttagtagagacagggtttcaccatgttggccatgctggtctcaaactcctgacgtcatgattcgcccacccgctttggcctcccaaagtgctgggattacaggtgtgagccaccacacctggccctgttcacatgtttttctaaaaattagtcatttgaagaaagaagccataagcattaatttgattatctccagcacctagcataaatcctagcatagaaaaggtgatcatgaaatttgatgaatgattaaatgagcaagtaaatacacatatatattgaataaatatacacatatgtatacagtgagtgtatatatatacatatatttgaattcggtgaataaatgcataaatgtttatatatatatgtgcacatcatgcacacaaacaaccttctgctcttttctcccagatgcacacaattaaagtaccacttcagaaaccactaatctttctcctgtgtgccttagactaggcttccccaacccccaggccacagatcagtagtggtgcgtggcctgttaggaactgggctgcatagcaggaggtgagccaccagccagcgaacaaagcttcatctgtatttacagctgctccccatagctcgcattactgcctgagctctgcctcctgtcagatcatcgatggcatcagatcctcataagagcacaaaccctactgtgaactgcgcttgcaaggaggagaatctaatgcctgatgatctgtcactgtctcccatcactcccaaatgggaccatctagtcacaggaaaacaaactcaggggtcccactgattctacattatggtgagctgtataattatttcattatatattacaatgtaataataatagaaataaagtgcacaataaatgtaatgtgcttgaattatcctgaaaccatccccccactcccctccccggtccacggaaaaattaccttccaaaaaaccagtccctgatgccaaaaaggttgggggctgctgccttacacagacaaagtttattcattacagattaattattaacatcttagccttttcacaagatggcgctgaagatgaagaaggaagctcctgcccccaccgaagctgatgccaaaacaaaggctttggccacaaaaaaaaaaagatccatatggcaccctctttctggtggcccaaggcactgtggttgtggaagcagcccaaatatccttggatgagcacccccaggagaaacaagcttactcactctgcctcatcagttccactgaccactgagtctgctatgaagaagatagaaaacaacatgacaatcgagatggattgatggataacagaatgatagatatgtgataaaacaagtagaataaagtattaatggtggattctagggagtgggcatataaatgctcatggtaaattattttcaacttttctgtatatttgaaagtcttcatgataaactataaaggaagtaatgtgcaaaaacgaaaaaggaaacaattatacacttgggttcattgtggatatcaaggccaacaaacaagcaccagatcaaacaggctatgaaggagctctatgaccctgatgtggccaaggtcaacaccctgatcaggcctggtggagagaacacatatgttcaattgcctcctgatttacgtttcggatgtggccaacaaaactgggatcatctaagctgagtccagctggctaattctaaatattcaccagaaaaataatcatttaaaagtaatagtaataaagacttgatggctcctatctcagactgcctgggttcaaatccaggctctatcacctggcagttaaagttacttaactttcctgtgccccagtagcctcatctgtaaaatgaaaaaaccttccttacagggatgcttggaatattaaaggagttaacacgtatcgaataattaaagcctaaaggttcaatgaggacaggaatttttgttttattcattgccatatccctagcttatagaagagtgtttggtacatagcagatgctcaataaatttctattgaatgaataaccaatattaggatagtcaaaatcgaatcgctgttggctattattttatgtttgctataaaagttcttaattcccatttcaatcattccccatcccccaattactgccattttcactttgggagccatggcactttcctataatgacacaagatggcagcatcactctccttttaagttatcagccaagctctagttgaccagttttggaaattctctgaagcatctttatttgcaagttcctccatccgttctaattttttttttaatgaacaacattaactgtttgaattaccataagattagctcttaactgctctaatttctagctaagaaaagattactacttgtaaaagggtaaaaatgttgacatgaatccaagactgctttccagtaccactacgattttgtgttcttaaagctccctttttgtaacaaaaaaactgcttgacaaattatgaagccaaatgtgtttcagagacacaaggtgcaacaatgttgttcccttccaagcctgtaagaaattacaaacaaaatacaacttcccctctgtctctttactaaagacatgaagctaattcttcagtccctctaagttactctgtgaattcactgttgaacagcagaaatttctgagcacctttgagtgtgagaccttgtggggtaaagaaaaaaaccttagtttagaaattaagagacctggattccagtggctcttcaggaatctcctcaccaccaactttaatcaaatctcctatctttccaagattcaatttccttattctaaaacaaggataataatctctgccttacctattcggaaacaagatcagtgaatgtaaatagcattataaactgtaaggggtataactgtattataaatattataaactgtaaagcattatacacttcaccctgcatgagctaatgttagaatcattttcattttacctrtggggaaaaccagttctatccagttaagtgagcttgcctcagttttctcatctgtaaaatgggactaatgatagcaactccacctacttcagtgagttgtaaagataaaaataagataatagatgtgaaagtgcttttaaaatgaaagtactttcacttgtactctcacaagattattagcttaagcaaatggcttttcttagatttcacaaacaatcctgaagaaaacaacatataagtaaatcgttcaagaaaataagtattttgaattaatactttctgaaacctcaagaaattgcatattttaaaaagacaggagttgagaggctgaagatgttattttattcagggaaggatgactacaattaaatggttatattcaaggtggtacttgataaatgctttttaaatagctgtatttaaatgaggtattttgtagaaataaagtgttcattgaaaatattaacattcaacttgccagacgcagtggttcacgcctataatcccagcactttgggaggccaaggtgggcggaccatttgaggacaggagttcaagactagcctggccaacatggtgaaaccccgtctgtactaaaaatacaaaaattagccaggcttggtggccatgcctgtaatcccagctgtggcacgagaatcgcttgaactcaggagggctgcagtgagctgagatcgcgccactgcactccagcccgggtggcagagcaagactctatctcaaagaaaaaacaaaattaacattcaactaatatttattgattgcctattgtgtaccaagcattttcaaatgtattatttcattttatacttttaaaccctcctcacaactacagaaaatgtcagccccatttaaaagttgaggaaactgaggttcagggaggttattcagcttgcctcaggtcaaacagcagaaacccttctgctaatcccctgccccttcctgccttttctcaggagtattacggtagatgtttccattcagtcctctggaagcaytcgtgatatcaaatccaacacttatagcagcaagctagcaatttttgtttagtaaaaaccagaggtggaatatgaatataacagtttggaagaatctggataaacagactcttcttagtcaaaatgtctatgtcttcttaagttaacttcaatggcttaagaaacttaggctcttactttttgaccatacaattttatataaaagggactcagctactttcctcttcaatatttctagagccaattcataccttttcaaaactaaaaataattaattattaaatattgggagtcaaaaagagagagaaagaaaattatgaggtaacgagagatcttagaaatgaaggccatttaaatgttgggaggtatcagttatgtaagaatgatgtgctgttgttgtcacacacaataagtcaatcttaaaaaggcatttatccctgctgatrttatagtttttatacagaccaatttaatgaactggatgtcattttgatgtgtgaattttggtaagtttgtttgccagaaattctaattacttaattaccttgaaatgacaccattctaaattatcaagtctgttttattgcaatttatttgctggtaagattattcaactttagggtttaaggcaaagaggccttcaagtttatatgtctggttagctgctttatttcccattatctaaagaaatatgttgacactatattttattacttgttcaaatcagttttataataacaagtatttgtagcggtcctttgaagagttacccaaatataatacctgtttgcatagaactacatacatcaattaacactatgatcttttagttatggaaaaatagcccacagagccttataaatggaaatataaaagtcttatttaaacatccatttattatcccttttatctgcttttggaataacaggctttttgagacagagtctccctctgttgctcagactggagtgcagtggcatgatctgggctcactgcaacatccacctgcccagttcaagcaattctcgtgtctcagcctcagggagtagctgggactatgggtctgtaccaccacaccagtatttttagtagagatggggtttcaccatgttggccaggctgatcttggagtcctggcctcaagccatctgcctgtcttggcctcccaaagagctacgattataggcgtgagccactgcgcccagccagtctgacttttaaaaatatgtgtattcttaaattaataaaagtcatttcacagataaggaaaagcagacaggaaacatacagggaggtacctataaaattcatgtagttactatttctttctttgacttaggatttcaccattattgattgtggtattaaggtcaaggctctcgcctcatggagctaacaatgtttgagggacaaattatgaccacttgcaagtaagacaagccactatattccactgcacatgaccctgtcttattatttcactttgcaagtaatttcatgatttgcaaagtgaagtaatcagatagggccgtgtccagtggaataagaccttgagtatctactcaaggtcttttagagctccaaggagggaaagatcagagaggcctgcagtttcaagaaagcttgcttttagattggaattccaaaagcatggtttggtgactaagaatttcaaagatgactataattacaaagacaattgagtaggcaaagaccctggaatcctgaattcctcttagaatgtcagtaattatgaacctggccttgttttgtttccactcttttaacttttcaagagaaggtgtttctcaagaaaaagctatctcaagcatctgccttctgaactaccctggcttttacctgtgctatttgaattgagagtgctgtgtgtgatttgcagttggatgcttcagctccaaaacttcttgggagagtcagatcttcttgcttccagaagatagcaatgttgtctttctttgcaagccccacttactaaccggtgctaacttgagcttaattcagtacacagcaaatcccgtgctaggtactagagagatgccgcggcgctgataacctacacagtttgctagtctttaccatctgtaacaccaaatcaggctgacataggctcatgcctgtaatcctagcactttgggaggccgaggcaggcgatcatgacgtcaggaatttgagaccagcctgaccaacatggtgaagccccatctctactaaaaatacaaaaatagccgtgtgtggtggcacgagcctgtaatctcagctactcaggaggctgaggcaagagaatcctttgaatccgggaggcggagattgcagtgagccaagattgaggcactgcactccagcctgggcgatagagtgagacgccatctcgggggaaaaaaaaatagttagaagcaaagagttgacagtgaagttaattctgtgcaggaatgaagaaagtactcagagaggaggtgacatttcagaggatactaaagcaagagaagcatttccctaactagaggaggaaagggtatgcattataggcagagcgtgcaggagagcaggggtgtggagtgtgaaaggattgtaccagaaagggcaattgtaccagaaagggttgatggtggctgcatataaagttatcaaaacccaaaacaagtcagtgtaagaaagaacatgattcatataatgtatcaaaaagctacaaatatttccatttctgaatgcacacaaagaaccacctggaaaaaacatccatttattgtccactgtgcccaggtccatgctaggcactatagaagatacaagggaaggcccttgccctggaaatgtttattctctatctggaaaaaagattaactcacataaaataattaaaaataagatgccagcctctaaggaaaaatgttagattgtctgaaactcaagcagagagcattttggctgccctggaattccccatagtagtagaattactcttggggccaagagaggggttgcctgagactccttcacccagaaaaaaggtaattgctaaccctcacagagcacttcctatgtactgggcactgttctaggagcttatacggattaacaaattaagtcttcacaaccaccctatatgaaaaggaacagttatctctagttacatacggggaaactgaggcacagagtcacaggattgaaatccaggagatgtggttccacagtcgtgcagtctttttcattttagtattctcaaaatctagcgtagtacccggtgttggatgttaagatcttaaacaaacaaacaacttgttttccttaaaaattatattttcagggtaatacaattcaagtcacaataaagacctgaaagcctcaggtttgtaggtgaggaaaaatgcattttagctgtacagccctaacttttacttgacccaaggccagcaagaaaatgtttctttttatttatatatattttttctttggtgacaatttggtgtttctgaacgctaggggctcccggtttctctggtttgagagtaacttttccttttaggacttttttttttttttttgaagggggtgggggaaaatgtggccttaattatcctacgtcttaggcagcttaaggaaggggctgtgctttcggaatcccatccgagccaagtaaggaggtccctctctctctctccccccacgtcttctctttttaaaggacctcgtgaaataaaagtgcagaaaacaaacccaggcgatcacagcagcagccgccgcggcagcagcaccaacagcaggaggagcaggaggagccggaggaggaggaggaggaggaggcaaagttagagttggggctggcgctccggagttgctgggctcagcgcagctcccattcattaaggaaccagctgcggaggaaggtggccgagcgcccgcgctgcccactcgctcgctcgcgcactcagacgcgcgccacaacagcgcgccccaagctgcgcagctctgcaaaagtttctgctcgggatctggctctcttccccttggactttagaacgatttagggttgacagaggaaagcagaggcgcgcaggaggagcagaaaacaccaccttctgcagttggaggcaggcagccccggctgcactctagccgccgcgcccggagccggggccgacccgccactatccgcagcagcctcggccaggaggcgacccgggcgcctgggtgtgtggctgctgttgcgggacgtcttcgcggggcgggaggctcgcgccgcagccagcgccatgcaaaactacaagtacgacaaagcgatcgtcccggagagcaagaacggcggcagcccggcgctcaacaacaacccgaggaggagcggcagcaagcgggtgctgctcatctgcctcgacctcttctgcctcttcatgggtgagcccagccccgctgtccctcggcccctcggcccctcgtccctcggcgcgcgtcccagcccagtccggggccgcgcagcgccgcgccgcgccgcgccgtcagctccggggggcccccgcagccttcctggggagcctttgcgccgcccaggcccgaagcccccgccctccccgatcccaccgacttcttggcctgtacttgagtgggtctgggcgtrcttaagcgttcgtgggcaactgttaaaccagctcagtaaaagtcgtctccacgttggaagcccgggcggaatcccgcggaaggtgtgggttcgtccttttagcgtaggggaagttggttgagccgcgctctagagccagcgtatagctagctggtcgccctccatccgagtgaaatggatcgccccgagagtcgggctcctgcctggagccgagctgccttcccggcggctgtatgtaaacatccagcccttccgcctttgctgcccaggctcgccagactggctagccggccttttcacttgctcctctcctgtaggtgctttccccgggcttggtgctgggcacggcttcagcaatcacttgagtgcctactgtgtgccaggtggtaggcggcttcaggggcatcagttttagctcgcccactctctgactcggtgcagcaggggtgatgagccccatttccctgatgggcacattgaggcactgggaaagccagctgcgatcttgtttggggaccacaaatttaattgcgcccccagaaagttgaggcgatggtccacttctgttttccaaagtcgttggaagccacagctggaagagcggtgggagttaaaggaattggagtgggagggcgaggaggatttatgaactcggtaggggagggagaaagcgcttcacaagaatgaacaggacttccaaggttgaagtcagcctaggatttttttttttttaaagcgaatcatggtgtaatggaaaacgcacagtacttgtcatcagaacactgccactcttgccacttgctgggtgtgccacttaactgcctcatgggcctcagtttcctcagcagttgaatgagtgggttgaagtagatgctctccaaggccccttcccgcattaggaactcggatttggtccagaagctgttctgccaactctgctaactgaagaaacatctgtgttcccaattcagttcccttaaaatacagctcctgcacagacttaagtcccctttgaaatggatttgtccatgcagattttgcagaccagagacttcttaggctggagttatacctctctggtattcatgactctttctgtagcactgctcttactgtgcagtgtcctcttgatggtccatagtaaagaaagataggattcttagagtttaaaaataagaacggcccccttcaggtaagaagagacagctgaaggtataattgtgctctgtggaagggtggaggggtggaaaggaagaaaagtcactgtagttcaggtggcacatcccatttccacgtctctcaacattaattcaacattaagatgctatgtaaaggaattgtcactggggggcctaccttcctgaaggcagctggctcattatcatgcacagtgggacagattactacttaaagtcttgtaatcaagctgttgaatttttaaaagaccctctctggtcccaggggagtacaaggaagcactaaacacatggaagctgtttgctgtaaacttgcctggaactccctgtgtttactcagtgtgttttgttggtggcagggtaagctctttctagagtgcctgtgcaggataccctcctacctcctactttgtgattaagaaagcagagctagaacatgcttgacagcctttgtacaatttcctttccacccttgtgattttagaaggcagtcccaagagatggtgtcttatgaaagtgaaaaggaaagagatgtaaaggaatttgcaaaaagacacaaccatcagctgtagtttagccagggatgtaaaaacccaagctactctgttgtacattgaaggtgtaaaaaaggtgtgtgtgcatgcatgcatgtgtgtgcatatgcatgtttcagttcttcatttccccactatcccccgtccccccaaagctaatattctaacctgtttattatatttattcactgttggtcttatgtttgaacaaaatgattttgtttatctccaaaaagcaataaggcrtcaggaccatgtattctgttatagaggcacatagctacttgttttcaggggtgctttgccattaaaaccatggcaacattttcaaagtgacttattgatcaatgtttcccctgagcacaggccaattacaatatcactaattaaatgtctctcaaacacctttaacaggaaaaattctttgtaagagaaatatttaggtgagatatttatgcaggagaactctatttggcttccaaaagaaaaattaatagcacaacatgtgattttaatattccgcacaccacagtcctaaaaaaaattgtttccactttttgcctaagaccgtcagtataatttaatttttatatagtttattgatcatatggtctggattacagggcactaatatattaagaagagagacagttttctgtttattctctcacaggaatatataagaaacttcatctagtatctggaaaaaataaaagctgatgtgctatgtcagtgttatgtaagtggaaatatgcaagtagtttaacttgtttcacatacctttttagaacgttaaattcttggtgaaaaagcagaagtctactcttgtttgaaagccaagacaatctggtgtcaaataacaccagtgggagtttacctttcattggacagctatctttaccgattaattgcttttaaatacagttatgaatctttgcgtgatagttttcctgaaattgattttgttttccttttaattaagtaatatttatcacctcctggtttttgtacattgattgtggtgtatggggttacaggagagcracagacgattcccaggtaagaagggaggaacagttattgtctttctaagctctgttagtctcttttttatataaattcatatatgcatgctttaatgcaacccctatgaataaattatctccattttataaaccagaaaccatgtctcagaaaagggaaggatagactaacactgaagtcgatttgaattgatccccagttctcagtttagcatgagtggaatcctttccccacctgaagaatcttgaaattcaggttcttatcagaaaattctgaagctcggtttgcagaaagttctgcctctcccgatttcccagttacccatttgcaccaaagcagaaaaataaagttggtcccagtcttccagtcagtaatacggaatttgggtggtcagcaaccgtgctatttaatttggttgctccaccacgtttttggatgttttttgatttccaactaaatggttgagctaaaattctagaactggttctatatatgggatacatagagtcatcatttattattatttactttaaatagtgagagaggggcagcatggtatagtgcaaaaaagacacttagagtcagaagcttyaggttccacgttggccagtgccactatcgagttgcattgtgtggatgagtcggttttctgtgtgtctcagtttttttccacctgcaaaatgactgtgtgggattatgtctattattrccattaaacatgcggtgaccgatttctagtagaggcttgacgttagagacttgacatatgctgaatgtctaccctatgcatctactctgctgagctcttcattatatattagctctgtgaatcatcacaaactagagacagtcattatagtcttgtactgccactgcactgtacagctttggaaaaattcatttaaattttctgagtctcagtttctttaccattgcgaaaaagggaaggaactagaccatctttcagtgtccttctagctgtaacaattttataagtctaggctggtaaatattgtgatgtagtaacatacccactgcccctcttagaccatttgtcattaattgaattgttatatatgtatgaccaaagaattaatgttgaaaattagcttaagttggtgttaattctggaggggaggtaagcactgcttttattaaggttaaggcaatacgttgagaaactgactagatttttcctacgccggatgtgtcctttcacctgcttcctgaaatttacatattttcattaatcaaccggtaaattgcctagccaaccatccttcgtagattaaaataaagaaaagagcctcgttgggtgcagtggcttactcctgtaatcccagcactttgggaggcagaggcaggaggattacttgagctaaggagttcgagatcagcttgggcaatatagtgagaccytgtctctacaaaaaaatcaaaaattaaccgggcgtggtggtgcaagcctgtagctgtagcccagcttcttgggaggctgaggcaggaggataccttgagactaggagttggaggctgcagtgagccatgattgtgtcactgcactccagcctaggatcatttagtaggtaagccctgttgacttttctagtatggttaaaagcttttattcactgtccataatggttagggtttttttttttttttgagacagagtcttctctgtcacccaggctagagtgcaatggcgtgatcttggctcgctgcaacctctgcctcccggattcaagcgattctcctgcctcagcctcctgagtagctgggactacaggcacgtgccaccatgcttagctaattttttgtattttagtagagacagggtttcaccatgttagccaagatggtctcgatctcctgactttgtgatctgcccgcttcagcctcccaaagtgctgggattacaggtgtgagccaccgtgccaggccccttttctgcttttaacccttttgattacctgtcaattttagattcttcctttaccctttcttgtgcagttgtttgggctagaaagcccagttggtcacagcgtgatgctaatgagaccatagtcaagggcttcttccctgtgtaggcagttatatttatggagaaaccctgtcctgtgtgtcagttcaatccagtacacgttatgtgaggagtaatactttgttttggggttgcctattacaccagtatttcataaactcacctaacatggggcctatctggtatgaaatacagattctcggactcttctccaggatattcagattcagctggctttgagccaggacctgggattctgtgttttataaacgctgccggtgattcttatcaggccaattttagaatcactatgttgtttaacagctgatatcttaagggcaatttaattatgtagtgggctttttgtccctgcactgaatgttctggcattttctgcattgttaggttgtctgtactttttttgtttgtttgtttgtgaccagtgcacctgtctttttcagtaaagataatcaagtttgcaagaattcttccgaatggaaaattacccctggatgcagacctgaaggtgtcctgtgtctttcagtgcaaagacttggtgttgtttctaatgccaagaggctaaaatctttatgtattttctggttgtaaaccgaactctatgtaattgaagttgccagccatgtgactctttggataaatgaggtgttaattttaaatattttcttttgagatattgaagtttgtgcatgagtgcaaggtgaagcaggaataaattagattcctaaatagagcctttagaagataaaataagcttggcaaagtagtgtagaaacaatacaagctttggatttccccaaatctgtgtttgaatcctgacataaagcaaacagccaccttttgccagcatgtaattttgggcaaaaattatttaacctcctccaggcttcagtttcctcatctgtaaaataagcaaacctggtaatacttgtttgttgtgaaacccaggtgagataatgaaactgaaagcattttgaaaagttcaaaatcacgttatcattatcaggtaggaatgaagttgctgttgttcttcatagagtcgaattttcattttcctcccagttttcttactcctcaatggttctataaaatcctcttatttcttggcagcaaagttgcctgaactatattaaggaaaaagattctgagaagaatcccaagaaaacaccaagcagagtggacacaaatgttttccattagctgaagaaaagcagtggcaggtttcctgaccctttctgggaaagtcaaagtgcaggaacctcaataggctttggtggttgcattcttcccctttgaaagggacaargccatattatcttgagagaaagacagatatgccttaggaagggtgggagagaatttagacacgtggtctgttttagggtcaactctcacttgggtcattcctgtcattsaacagcccagaggaaaaccaaactaaaagaacagcaaggccaggcgtggtggctcacgcctgtaatcctagcactttgggaggctgaggcaggtggatcacctgaggtcagaatttcgagactagcctggtcaacatggtgaaaccccgtctctactaaaaatacaaaaattagccgggcatcgtggtgtgtgcctgtaatcccagctactccggaggctgaggcaggagaattgctggaacccagttggcagaggctgcagtgagccaagatcacgccactgcactccaggctgggtgatagagcgagactctgtctcaaaaaaaaaaaaaaaaaaaaaaaaccagaaatgattggaaatgatcgaaacgctggtcatctaggggaccctctgtatttgctgaggaaggaaggtactgagctaggctaccatatttattatacaggccaatcatgtggtatagagacgatcccttttatagaagagggaactgtagctcagagatgttaagtaacttgcacaagggcacccagctagaaagcagtcaccaacttttccagagctcttgtcaggttaccttgctgccccacttttcaatttgcaattaattgattgcaattaatgcaatcaaagcagtctttttcatttctttccattttgtttattttggtcttaaggatattattgggcagtggagtagacagagtaatatgtaaataattgcaaaacagcttaaagcttgatgaataagcttctctgtagacataataaagagaataccattggagcaattcctcattgcctagattcatggaatctttagaatttggaagtaccttggagatttcattatcaacgataccaaggtcattttttaatgtcagttagaaaaataggcctttttgagctggggaagggagagaggtgtgaggggaatagcacgggctttggagtcagactggagtctgctcactattattggccatagaagcttaagcaagtttacttgatctctgtgatgcctcataaatcctcatttacgaaatgagattctgtgtgcactgtgacgtggtggggacatgcctagtacagtgcctggtgcatagagacactcaagaggtagttgctgcagtcattatcatcaccacatcctagtcaatgcccttggttcacaaatgggaactagaggtcttggttggttagtaattgtccagtgacagtgaaagaggaggacctagaaccaaggtcttgcctttctaccattctgcttttcggatgtggacttgttggtttgaaatttgatattattcatgaggagagttccctggagagctttctctcttgcgtgcgtcagtagaaaaaggaacaagacaaacaggtttaacttttaatccatatcagtggatgttagctgagtgaagccaaagatacatgggacaaatgtgaaggactaggcagtgttttgaaatattacttttcttcaaactggtattttttcaggaaagtacttattaccaagatcactgctgaatgatttgagctggaacaggtgccacctttttcaaatgatgtatctcaggggagaaaaaagagactccatgttttcaaagtttttgctttttattatttatttatttatttttgctttttaaaagcctctcarcaaactctccttattcccatgtgactgaggatgaaacaktctcagattaaacagacttctcaaggtcacgcattgtcagtgccaacattcaaaagaaggctaggtcaggttcttgaacatccttgtgaaattattcttcccttaagtctgggttaaattataaattatgatctgcatttaaattcccaaatttaaaacaaaccaaacaaaacaacgcacttcagactcttttggaaacctttgaaaggaacttgatttctgtgtgmtttgaaagtatatattgcaatcaaggtattggtggtaagtgtgtttttgaggtttgtcacaaattaacaaaattatatgcctraagagttttgcagagaaatgcaaatcattrtaagcgccttgtcataataagtagtgtgctttggttcctgtttatgtatccctaaaacacataatacactattacattgacacgaaggaaaccattctcattgatggtttctttatatctggcccccaaattagtttgtggtatcaatcagtataatttctagagagcctattaagcctatgtttgtacctgtctttcaggtataagccttgtcttctgcagatgattcttgagcacctactatatgccaggccccagggtttccatggccttaaggaattcccaggctggtgaaagtggaacaggcttttgcctaatgacaaacactatataagtgatgactttggagccttaagggagggcctactctagcagcacagtgaagagtgatgaagcttgcctgagggtgtggagctgggtcttgcaagataaataatagctcacaagccaggaagggggagaaggtattgcagcagagtgaagcacaggtgctgagacttggaagcagggacctatttgggaagagtgagtagctggaggctggaatgtcaatattgtgtgtttgcactgtgcgggggaagaaaggaggacattggagatgaggctggagagataggttagagctagattatgaaaggggactgggtatggcaggcagctaaggaatttgagttttattttggtgaacgaggagagcaaatgaagttttctttttgtttttctttttatttttatcttggaagatttcatagagaaacctactacctaggagtgaaattgctgggtcctatggtaactccacatttacctttttgaggaactgccaaactgtttttcatagtggctgcaccattttagaaatatctaaaggcggctgggtgcagtggctcacacctgtaatcccagcactttgggaggatgaggcaggcagatcacgaggtcaggagtttgagaccagcctggccaacatagtgaaaccccgtctctaacaaaaatacaaaaaattagccaggtgtggtggcaggcgcctgtaatcccagctaatcaggaggctgaggcaggagaatcacttgaacctgggaggcagaggttgcagtgagctgagagagccattgcactccagcccgggtgacagtgtgagactacatctcaaaaaaacaaaaacaaaaaactaaaggctagttacagtatgtaagaaaaatacaatagttttataaaagacctttggaatgaacatattcatgaaaagattggaggagggaattaatttaatcttatttgggtttgggagagatgactggatttgagggtaggcaaatgggaggcagaggagctaaagaccagtggggtggcaagtgcaagctgaaccgagggtactgtggtgggagcagagagggctggataagaaagacatgacagggccgggcgcggtggctcacgcctgtaatcccagcacttggggaggccgagtggggtggatcacaaggtcaggagttcaagaccagcctggccaagatggtgaaaccccatctctactaaaaatacaaaaaaattagccaggcatggtggtgggcacctgtagtcccagccactcgggaggctgaggcagagaattgcttgaacccgggaggcggaggttgcagtaagccgagatcacgccactgcactccagcctgggcgacagagcgagactcgtctcaaaaagaaaagaaaaagaaagatatgacaggtacttcctgaactccaggttgggagcctctgaactatggtgaggccactccttccagaaacactttaaatgcaggatttataggagatttatgaaatctattagtaaatgcttttttatgtgcatagccttattatgaagacgaggctgtgagttatattcttttgttctggactttttaagtttctcaaatgccccttaaaataagtgggctataaatcctcttggcttagagaaagggtttttcctgggttgcaatggtattttattcaaagagctttattgagatattcacatactatgcaattcatttctttaaagcacacgattcattggtttttagtatcttttctttttttttggtttttagtatcttcacggttaggtaaactatcaccacaaccaattttagaacatttcatcactgcaaaaagaaacgatacccactaccagtcactccccatttttcctccaccttcccacatctcatggcaaccacgaatccaatttctttctccatagatttgcctgttctgaatatttcatgtaagtataatcatataatatgtggtctttcgtgactggcttcttccacttggcgtacggtttttaaggttcattcatattgcagcatgtatccttcatttctttttattgtcaaataatattccattatgtagacataacacatttcatttttaccttcaccacttgatgaacatttgggtgatttccactttttggccattatgaatagtgctgctatgaatatccatataaatgctttcagttctcttgggtctgtatacctaggagtggaattcctggatcatatagtaactccatgtttacctttttgaggaactgccaaactgttttccgttgaggctgcatcattttagaaataccttaagattgggctgggtgctgtggctcacgcctgtaatcccagcactttgggaggccgaggcgggtggatcacgaggtcaggagattgagaccatcctggctaacacagtgaaaccccgtctctactaaaaatacaaaaaattagccaggtgtggtggcgggtacctgtagtcccagctacgtgggaggctgaggcaggagaatggcatgaacccgggaggcagagcttgcagtgagccgagatcgcgccactgcactccagcctggrtgacagagcgagactccatctcaaaaaaaaaaaaaaaaaaaaaagaaataccttaagattaatgcagacatgtaagggaaacaatgccagaattttcctgaagatttggaattaacatattcataaaaccactaaagcgtcactttgtttttagagggatttttcacaaagaaacacgttttgaatcagtttagtggtgccactgggtttaagatgagtgagcagagaacaataagctgactgggaaatcgatgctgggtggtcagctagacccgctcacccactgagtagcacttccacaaagcaggctgtgactgtgacgtacagactcttgtctcagcagaacaaagaatggatcttcagagtactttgaaaacagttaaacatgcaaatagtaaaacctatatatccctgggatctgctttacaatattttaaaggcatgaaatagaaacccatctattttcagttcctgatgaggctgatttttcacccttttccccacctctggatatatggctgtgtatgtgtagttgtcatcttaggaactaaaattaccatgtatcttttagactcatgtgctggatgccaagaaatattaaagaatataagacacaaatacaaatcctgaataatgagttgakctataaatgcactaaaaaatcaagttgtaagtatgtgaaaattaaacctcaaatattacaaaagggtgaggaaaagggatccccatttattgttaggtgcttcacatgatatctcacttaacctttttaataacagaataagggaaatgtttcaaacctggttttgcagctcagagagggtaaatgatttgcccaagttcttacagctgatatgtatcggggctggaatttggactcaagcttgactaaataatgacgattgctgacatttattgagtgctagctaggtacctctcaccaggttaagcagcgtgtatacattctcttatttaatcctcccaatgagcctataaagtacttgttactattgtctccattttacagaacggaggtaagagaggttaaaaataacttaccaaaggtggtgcagtgagtgagtttgagaggtggggtcagacgtctgcctggtgaggtcattcttaactactaggccctactgcctatattctccacgtgtttctgaatcccatgcttttctccactactccatgctggctttcgcattggcaacccctgaagcgtcgtccaaaatgagttggactagtggttctctggacctgtgaaggtctgttaggtcaatcatggggcatcctctgctattttcagtacttcagaaatatctaggcatactgaactttcaccagtgattaacttgtcaagcctaactcacagcatcagcctctgcctagactagtcaaagtatcagcatgctgtgtttgtgatgtgaatgactgctgtcagttcactctggtcttgtttatttctgctaatgatgagatgagacactttttgtgcttggattagcaaaaataaacgatgtgaaatatagtttacttggtaagtacagatgtcttctagatgtgtcatagaggggcaagaattaactatgagggatttttgttgctgaaaaggctggacaccctagaatggaccatcagctctaaattttgaggtaaggaagaccactgggtcctggatcctatagaaggctttctaaagaaaggaggggctttaggccaggcgcagtggctcacacctgtaatcccagcactttgggaggctgaggcgggcagatcacctgaggtcaggagttcgagaccaacctggccaacatggtgaaaccctgtctctaataaaaatacaaaaattagccgggtgcggttgcgggtgcctgtaatcccagctactcgggaggctgaggcaggagaatcgcttgagcctgggaggcagaggttgcagtgagccgagactgtgccactgcactccagtctgggcaacagagggagactctgtatcatttaaaaaaaaaaaagaagggactttaggccttttatcattcacatcaggcagtggtaatgggtcactctgtttgtgaccctttttgtaccttaggctcgagctactgtccttgtggtttggtgtaacctttaagtcacattgaaagattttgagcttctctggttagtggctgcggatgcagctccttcattaaatgcagtacatggaacttctaccagtagcctcttccccacaaatgacccacattgttgtwaagttagcaaccactgacaggaagtggcagaatgcgtctcagccacacagcagatttcattagacactctcccaaagtagctgtttgggtcaatttggcctcagtaggtttatagagaagaatggcttaatccattatttctcattgttacatttgtcttgctgtcatcttagccttaatggatgttttcattagaagcacagtgtcttccttggaagcaagtgcacacacatatgatcagagagaggaacttccagcaagctgagattttaaaaatatttccaaagttgttaccaacttactggagaatcttttgtttattgggtttgtcatttaaatctgtctggagagtagcagctccagtgacaccgcaggagggattttgggctgcactcacctttgtgactgattgctttgaaaggtcagctctatagatgttatatgaaagcagaattcctagggactggctgggaaattaaaatatacttcttgagtcaaagcattcaaaatacagggctttcaattcgaggggaataataagctgtcttgattttaggtttaattttcctaaggctattaatggagttgagggacctttacttatgattttgccataaatttgttgttgcagytgtgcttgccctagctgtgaaatccaaggatttattattaattaataatcccttttactgaacaattctaccaaatgataacgtttgcatctgagagtttgaatttatatattctttcttgcctcaattaatttttctcattgtagatctccagttacctagcccctcaaagcaaacaaaacatcagtaccaccacatgcaaaatatcattgttcacatgtcagttggaacaaagctgggaaactaacctttttgagcattgacagtatagtcagacacatccacgaatctcatcaaatcatacaagcctgaaggggaggtattcctctaactggttttatagatgagacagtcrttgtgcagagagattgaggggcttgctcaggatcttgggactagaaaatggtggagcttgtaggctatgacccaaccaacacctatgctctttcctccaagaattaagattgcaatttgaattttcactattagtttcaataatgagcatatgaagaaagcaagcaagtcagaaaatttaaaaatgaaattatcacaccttgtaaagtgttcagatttgacttgaagtttaaagtcttttgtccatttcagtatttcctgtttctttgtaaatccgtagaggatagacgtgaactccaaacctttacactggaagagagaggcatgaactttactgaatacttaatatgtggcaggcagtgagctaggggcttttcatacgttattaactcacttggatttcacaacaacactatgaaggtggaggttgaagttcattctgtttttctcagaacttggtcagcaatgtctatagcaatcctcattgatgggttggtgacacactgttaataattcagctaatcagtagcagaggtcatttactaacatttcagggaaaatgctctgctagaatctgctttgagctggtcacttgggccatctatccacttttactgaaaatatatcagagagaatctcagttccagttctgtagagccttagaagaaaaggtcaggagccatggtaggagaatacttggccaattttctacagaaatggaatatcttttctgcagagagacagcaatatcagattgtattgttaattcttcttatcagtcttctccaaaggtgttaaaaagccagggaaatgaaacattttgagtgaaggagcctgcactttggaaaacgctccgtgtatttcccaggctattgtagggcccctattcagttgggatttgaatggtggtgtgattagcatgaaagcaagtgtataaagtaggtcttttctccctttcctaaaagaagttttgtggcatttctttttctgacagagttggcatgaagctttgacaaacacagacccatggaaaagttaaataggacttagagtaggtccattttgtacagatcctacacacttagaatgcagagcaggaaagcagctggcaagaggcccctcaaaccataggaatcatagcaagggctcttcctccactgtggaccaaggatgaataggaaacacccacaagaccaatgggaaagtatatcctgggctgttgatcattttctgtattaccagaaaatgacagataagcacatgcctgtgagtccactgcctatctctcccagtatttgtggagataaatacaaagtgctgagggaaagtctaagaaatataagaggtggaacctgccctaaggaagaaggtgacaagatgagaagatggacacacagatggaaaaaacatggccaggtgtcctgagctgataattaaatgaaattttaaaaatatwgagtctaagagatagcttgatgctgttcttgcctccagtctcagctttgctgtattagctgagtgaccttgggcaaatgttttctattttgtgaatgataaaatggggatgatgatttgttccctgcctacctcacagagcttttgagaccaaatggtatagtatcccacaggtatagaaaaatattttgcaactgcaagctcttgtttgtacaatgaatattttttttgttgtgtctgaatttgctctcttttctccattcttcctttttcgactgcattttaggcacatgctatcatttacccagatctgaaaaaatgtctttacagattttatttctaggttgatagtctctcctcccccgtgtattctttatgcagtgagtctacagggtcatttgttactactacaatcccgatcacataggcctgtctcttcagaacaggactttctgaccccttgttgactacagaatccatttctcagcatatttgagactcttcagaatctaaccctaaccaaacctttcaatttcttgcttctcatccccattaccccactctctcccaaccccttcacacccttctcccagacatctccactctggggcttttccaggtccttttctaccatgccattctttctctttgcttggtatgtgctatttacttccttttttttttttttttttttttttttttttgkgaaacggagtcttgctttgtcacttaggctggagtacaatggtacgatcttggctcactgcaacctccgcctcccaggttcaagtgattctcctgcctcagccttctgagtagctgggattacaggcgtgtgctaccatgcccggctaatttttttatttttagtaagggcagggtttcaccatgttgcccaggctggtcttgaactcctgacctcaggtgattcacccgccttggcctcccagagtgctgggattacaggcgtgagccaccgtgctcagccaaaaaagaagctacttacctcttgatagtcacttcaaatcctgcctgcctcctctctgaaatctcttctaaatagattttgaactccttgtacataataggtgctgaaaaattttcattgaaaaaaagtatataaagatattttataaaatataaacaagaagtaaaaagaaaaagaaaaattttgttgcctataataccacaatcctgaggtagccactggtacagtttatcttttctataaatagctgaattattattaagtataattataaagctaaacactgggtgcttaaggcctgcttcctgtaagtcagtgtgatgaaatggaaaaaccctttacttgctagagtttgcagcggtcaataataaagtattaactaacctgagagaattgagaatatgtaactaacctaagaacagctaggtattttacattcagttttgcattcatgtagtattttgaacttgtttaacaaacaaaatttgtgctaaccatgatagcttctattaaaaaaaaaaaattctaacctaccctaaaagctagggctgtatttagaaggcattacttttttcatcctcctctcttgccttaaagagggctctgggccgggtgcagtggctcacgcctgtaatcccagcactttgggaggctgaggcgggcggatcacaaggtcaggagatcaagaccatcctggctaacatggtgaaaccccatctctactaaaaatacaaaaaaaaaaaaaaaattacccgggcatggtggcaggcgcctgtaatcccagctactcgggaggctgaggcaggagaatggtgtgaaccctggaggcggagcttgcagtgggccgagatcaggccactgcactccagcctgggcgacagaggaggactctgtctcaaaaaaaaaaaaaaaaaaaaaaaggactctgaatggggagaggaaaaccccctgaagggaaaacataggcaaggtgggagacaagaaatctgagtttacatcttaactttgttactaactgctatggtctgaatgtctgtgttctgccaaaattcatatcctgaaacctaatcaccaaggtgatggaaggtgggggggctttaagaggtaattaggtcatgagggcagagtgctcgtgaatgggattagtgcccttataaaacaggactgagggagctttttagcccctctgcccttccatcatatgagaacacagctagaaggggccatctttgaaatagaaagcaagtcctcaccagaccctgaatctagtggcacatactttcagtgatgctgagtttattccatggaggcagttctaattgttcaaaaggttatgttgatataaaatcaaccttcccataattttaacccagcatcagctatgtttggtacagttttggtaattagtagcattaataatagtatctatcaattttataattgaaagcacctgaacaattttataattaaaagcacctgaataaatgatggtgatgagtcatttccacaaatatgcattgagcacctttaatgcaccaggttctgtgctgggtgtcgaggtctaatgatgaatggggagaggtttcagtccttgaatcttctggagtagatgttgggcaggtgcagttctagaaatacaatgtatactctgtatagaggtarccgagttgaagggattattaacactatgtttgaggggctctgggggaaggcttctgaaagtggtaacatcacggttgtttggacaggcaaattagcagaatgcttttaggcaccattgtcaaggaagggactgcactgaagaattccctttagcagaatggtttctttgcctcagctctgcccagtaccagtgaccatcctttagaataatcttagaatacaggagatgaaggggacaagcatcaaaagttcttccttcctcatccccattttccagatgggaaaaccaggctcagagatattaactgtcttggaaaatgagtaaaatatagagaaaacaaaactcttaccttgtgcaggttcaagttcaaatccagtaaataccatagtttaaagcatccctttacacaatggatttggttattttgcaaaacagatattagccccatgtgtcagtaatctacagtcatttgtaccttaacataaaatgccaaagcacagtaatatattcttagtgtaaaaaaaaaaaaaaaaaattcaaggctgggggtggtggctcacacctgtaatcccagcattttgggaggccgaggtgggaggatcacttgagctcaggagttcaagaccagcctgggcaacatagtgagacctagtctcttaaaaaaaaattaaccatatgattatgtttaaaaggaatagccccttgcttactgttcctctaaattccactccccagaggcatctattgttcacagtttttggttctgctatccttattttgaatgcacaggtattctcattgataactacctttatccatattagtctccttgcttcctggaagcaacacacagaaatctgtattccagcctttrtttatgctctttcctctgctaacgcacccgctccttcttctctgcctatacgaagagtttccattctttaagctggtttctgctcaccctaccccctcactactccaacctgaggtaatttcacctcctaatctcaagccattccagctctggcactagttagtgaccttaaacaagtcacttgaactctgttggtttaaattttcttccctaaataatgaggcagttgaattaaatggtctttcagaactgcagaggtcatcaagtataaaagactctaggacagtgcctgatagttggaggtcttgactgtgttgaattaaccctgtyacaaggtacaaataggaggaaagatgaagagwttcaccaccacgagttaccacaattttaacccagaatcaaagttttgaagtttaggagacattggaacacagtggaaasaggatatgtcttagggccagacagttctgggttccgatcctggccccatcacttggtagcttataacctggatcaagtgttgtagtaaacttsagtttcctcacctgtaaaatggagacaatgatttctactttacaggtgtccggagagaaaaaaatacctcacagacagtgggctctttgacatgaatataccctgacccttaagtgtttagaaactgttatctgtcataaataattggcaagctttggaacaaataaatgcataagagagtgctacctgggtttataaaatgtgtaagtacaaagtatggattagacatagtttatctgatctttgaaaagttaccttggagtcctgccagagaatcatatggcagctgcacagatggagctacctttccatttgtgcttactaaagcatgtgttttccagttggaaaggaagatgctggaaatttgtctttaatgcattccagtgttgggagatgaaacctacctgagagattgagcagagcgtattaaccaatatcatttcaagttgattaaaactatcatcttaattaaataccagagaacaagaagttctcagtcttctggtagcaatgaaagaccaaagagtcaatctgaagttgtttttgcaactcttaaaataatactccctctcctccctcccgtgaaaagagtttcttagctatagacatgccctcacattgaggtttctgaaagctgttaaggaccacaaacctgctggcaaagccttctgctgccaaggcatcagagttctcaaaagcaagggggttcaagctcaggatacgctgatttggaaagagagcccaaacaaagggccttttgaggcaagaaactgggctttggctgcagcgcagagcaatatggggttggaaaagcgccccggggacttgcagagaagaaggactatgagatcgatggaggaagtataaggtttctccatacagtgagggtttagatttcaaaaccctcgaaagttggtttcagaagctatctttcctctgtcagcttcaccagcatgtctataaaatgtggacttgacaatgttatatgtctttgagcagaaaagggaaatgatccatggaggtacatacatataaccattctagtaaagatgtctgacctgaaagccagtggttttcttacaagacccaaagcaactgcattcattagtgcattcattcacccacttaattatacgtgtatcaactgcctactgtatgccaggttgctatagctatgaagttaaaagatacgattctatcaattctgattcagctcaaagaactcaaaatctagttcatcaaaactggaggattgaagtaaaggagacaatctttctttctcttcctttcctttccttttttttttgagaaggagtctcgctttgtcaccaggctggagtgcagtggtgcgtctttggctcactgcaacctctgcctcccaggttcaagcgattctcctgcctcaacctcccgagtagctggggttacaggtgcctaccaccatgcccagctaatttttgtatttttagtagagatggggtttcaccatgttggccaggattgtcttgatctcttgacctcatgatccacccgcctcggcctcccaaagtgttgggattacaggcatgagccaccgcgcccagcctctttctctctctctcattttttctttctttctttctttctttctttctttctttctttctttctttctttctttctttctttctttctttctctctctctctctttctttctctttctttcttttctttctttccttctttctttctttctttctttctttctttctttctttctttctttctttctttctttctttctttctttctctctgtctctctctctctctctctctttctttctccctccactcccctcccctctttttctttcttctctcactatgttggccagtctggcctcaaactcttgacctcaagcaatctatccacctcagcctcccaaagtgctgggattacaagtgtgagctactgcacctgcctgcccagggacagtccttcttgataaatacttcacactacattcacctatactgtccctccctgaaccacccagaccagtttttaaatttggcctttcctgaagtgaaacttttttttttcttttgaggcagggtcycaaaaacccaagtcatttttgacactagcataaaaatgttgctttttttctaaaggtaaattaatttatcattattgatgctttaaactataccacctaagatttggaaaagacagggaacatcactcataatctaccataaatactattgccattttggcatatttctttttactcatgttgattttctttcagttattaggtatatatacatatgatcttctatgttctaatagtcttcataattaaaattattttatcattacttgatcaatgaccctttaacatcattcataattaagtattcctgtatctttgtgtaatctcacctctctatatatctctgtgaccaaattcccccattttatagggacaccagtcatatggggttacagcccgccctaatgccctcactttaacctctatgaagaccctatctccaaataacttcatactctaaggtgctgggggtgaccacttcaacatgaatttggtgggagagggcacaatttacctttaaacctcttctctctacccctcaaattatgtgtgaggaaattgaggcccaagccaagtagtttgatttgcatttaggcctgactctaaaatgatacattttcatcacatcctgtttcctactcatgaatagaaaatactgtgaaccagggggaaaaaaaatgtcttcctcgatctgaatttgattagtgtgagactgtttgatggttattaactgctaaatttaactaagtttggccagttgaagccagcatcatcatgttatttaaaaagcaggttaagcacacacactagacttacctaaaactttttattgaatttaaaatatgtggctcacacctgtaatccccagcgatgtgggaggctgaagcaggaggattgcttgagcttaggagttcaagatcagccttggcaacatagcaagaccttgtttctacaaaaaattaagaaattagccaagcatgatggcccttgttaagcatgtttcacaaattgttccattcagggacacagtgacctagaggctaactggcatgccaataattccctggtaattggaccacattccatagtaaaagtaggcagtgttggatacttatcatcgatttttctcttgtttcttcatcttgagtttttgggtgtttttgtttgtttgtttgttttttgttttttttttkttttttttttttttttagtgtttggccttccttctcctgcataagtgattatggcaaattgcacacacacaccccaacaggcactagggaaggccagaaccagtataacaataacgagataatgtaaccagccagcccatggtccttacggtgtccatgtgcaggggacagataaaagtccccggggaagtcaccaagcaggagggattggatggggccggttcagctgcttccatgatggaggagtggaaatggcaacagcattggtttcagccctaactgagattgaagcctgtgagtggtgttcctcggagttgtgcagggcatggccacctctgtccctttccactaagtatcatttggcaaattacaactccttttcttaatttcctcacatgaatacaaaataacatttgaactgtgatcaccacatataccccattgctcctaagtctgtgctctgttcatcataggtgcttcataaatatttattgggaaaaaaaaatgaatgaagggagagtgaaaaatactgtgaaacagagatagggattgactatgagtgtgaagtgaacttgggaagttccaagacacattttatttaaaccagtgtggagtgctaagaaaatccccagttattttcctttagctggaaataatggaacattgaaaagacattggtatctttaaaactctacataggctgtttcccttgcctgctttaaagggagggaaatactctcacacagagacaaagagctaccctagtcatctttctttattctaatgtattttgagagaagaccatgaataataacaatactttccatggattgagtatactttatatatgacactgtatttcttttttttttttttttgagatggagtcttgctctgtcgcccaggctggagtgcagaggcgtgatctctgctcactgcaagctccgcctcccgggttcacgccattctcctgcctcagcctcccgagtagctgggattacaggtgcccgccaacacgcccggctcattttttgtatttttagtagagtcagggtttcaccgtgttagccaggatggtctctatctcctaacctcataatccacccgcctcggcctcccaaagcactgggattacaggcgtcagccaccgcgcccggccatggcactgtatttctaaacttcacagtaacccgtcaagattgattctagcctgttttacagatgccctagagaggttagcagcctgcttaatgtcacaggactaaaaaaaaaggtagatctaagctttaagctttaaacacaaatctatttgaccccaaacctgtgctttttctgctatccatattctcaatcacccactcgagtctcattaaaaaaaaagccaaagtgggggggaaaagccaaaggcttgatgactttcataatacgtggtcagtatgtgaaataaataatggatctctttatgggccaagacaacacttgtctctttccttcttacagaaggcacatcattccatattcataagagtaacatttactgagcattttctgtgtgccaggcattgtatgaaccttcttcgcacactcggttttattcctcccacatcactgtgagaggttagttggcttgttttaggttaaaattaggacccaagtgtatctgactccaaaatccacatacacaactgtatacatgctactgtttgccattgtatgtcagttgccagtggatagattgcccttctcttgctatttagttcgaatttagtcttaggtatggtcctgaatatatgtgttaagataacctgagggagtctatgtagggaaactccagcaatgagtttcagagaggtgtttgaaggaaagaagcaaccagccccagatgctcttggagagcaggcagtgtttatttgagctgtgctgtccaggacctggtgtggtgtcatggctgtaagaggccttaatgcacctcattcagggtggatgggatgtgtctccaagtgcagaaggcttttccttgggaaggtggttggtcacacctgggttagcaggagccagctaactaaagctcccataccccagtttatcttccacatgtctggctggcagggtgtactttctaaaacacagccttgccgtgccactcccttccccagacatagtcatattttgagtccctgctgggatatccaggactgtggagaggataaatattaaacattggccctgcagctaggaaatcagtcttgtttgaaagccacacacatgaatcatatttttaggactgattagaggttatttaggccagcatttctcagagaatgctctgaggaaaccaagttcttctgggttgcacatctcccaggtaaaacttaacaataaactctgatgaaggccctaggatgaaatgtccatgttgaatttgctttgggacatgaccagctagtctagcctcttctctctaatacaggctcagcgaagaaaagggactttcttcattcgcagaagaatccaaccttgaactcctgagacccccagcccaggactttttctgctgcacagagggcctctgcattttactcccctctttcagtttttgtctttaggcagtcctgaggcacatattttctcctgtatcttgaagccatatgtttctcaggcttttctcctcttctaagataggctgctaatgtttagcatctgaaatcatcctgtttctttcttaaagttgtcctgggaaagatactggaaagctaagttcccaactaggctgatgagaaagggagaggagaactgcaggtttgagtcctcacagggtccctgtaggggaaagatcaatttttctatgagaaccaggagctctctgagggcagaaaccctgttttactcatctcagtatttctcactcctggcacacaataaggttgtcagtaaatattgtatattcagtgtggtttaaaattgtgttgacttggtatatgcatatgtaaattgcatgctatgtaaattatatatcaatttttttaagcccttttatttaaaaatgaaatttttaagttttagagtagtgattctcaaatcaccttgggataaaatcacttggaagtcttattaaaaatcagaattctcatgcccttcccctgaaattcgggtcacgtagatctgggcagggcccggaatcagtctatctatctatctctccttctttcttttttttttttttttttataagtgcctctgatggtgaatggctaaatctgaaaatcactgtccagaggataatccccaattttacatttaggaggcagacatgaaaatatgccttagccttcaggtctggaaccttaaaacaaacaaacaaaaaccagtgtgcataggaatatrgaaagaacatatccggaacagtcagccagtaataccttgtgtcagatgcaaggggctatggagagaaatgatttgcaagcctaattagacctgctccccagttctcaaacctgcagctctaagccttctgctaattggcagtcccttaatagattaggacttggcatcaggtttgcatgttattataaaccacacacagaaaaacccagtggctgaggaactcctgccaaaccccagcctaggttttgtgaggcttttgaagtgcactggtcttttcagtattttgtatagtcagtgcactgaaaggcatcaaaccatttctttggatgggatttgcgaagggcaagtttgttgaataattaattcgccaagacccattctatcatcttgatggacaagtaggagctcacgtatgccgtttgctctcagaagtacctggggtatgataggagagattgtttctcatggatcctgtcccattcccaggcatcttctccttccccttcatgctttgagtggggaggggaggaggaaacgtgtgtgtgcacctgttcgaggcaggctgcttaccacgccatctcttctgccatcctcatgtcagcccttctagactgcaggacctgtcttgaagatgagcaaatgaaggtcctgagaattcactaatcaagtatcacactgccaggacttggcagaggtggaaggggagggacttgtatctaggtctgctaattgcacaccaccaaaccgaaccgaaccgaaccgaaccgaaccgaaccaaaccaaaccccaaacccagaaagccatttttgatttctctggtgttcgcttgattaacatgggctgtgaaatggttttctgcagttcacattgtgcgcarggatacctgtgtacatctgtggataatatgtatatactgtaagtgcttccctccccctcacattatattatagagtttccattctgaggtgaggctacccacgacagagtacaacattgtgcagtaggacagggagggagggtggagagtggggctttgccagagttcgcaaaggcctatgggttcccaaagccacactcaagtattcctcaggcctttgaacaattcygggggccttgctctcccctcttgtccttccaattagattccagttggggattcttccacttcttttcaaggccacttccacaaagggggagctgtcgtggaagctgatatttccatgaaaaccttccatttctcaggcaaacataccaggcagctstcatggcaataccatggtgaaggggaataatgttatttggcatttcgccctttaaaaaagtgtatgtgtgggggtgggtgggaggaggaggatgggcagagagaacagtgggggctttgtaatttactgcaatagaggggtcaggtgggctgggttacaaggggaggaggggcatagagaaggcctgaaccccccttgggcttcgcaaccctcttcctcccctctgcctgattcacacgttttgagaggttgtaaaggggaagctggggagtttttatgttttgatttggaagagggactctagacattctgtccctctgagagaagctggctccttgctgctttgcaaggattaagggcctggcttccagaaccattgaagaaacatcccaggatctacccttttctctcaacagctgaaaaatgcattacccagcagtggcttcctggagagttctggcaaaagagcctccctctggaacaatagggttcctataacaaaccacctaggagttgtttactgtagccagttctcccagtgtatccgaatgccttacattttgttattcccattctggtgggggaaggggcagcgctgcaggagcaactgaggatggtcccagagtacctggatttctgactacaggaagcagctgcccagtttgtgagtggctcccctccttagctccagttaaaagtacctaaagatagaatatctggtggcttcacagttccatggaaagtcagccrgacccagcgtccctttctggcctacttctctgtggccttatcactattcttcatttctagtctttgtaaaatcaggctcatactccttacccggaaaggattattggtcagaataagggaggtgcagcaataaagtgaccaggaaagtgtctagcggtagctaatgttaattcccacctccctccaacccaccgcccatttttgctgatgcctactayttcagcagagccaagagctgccaaacattcgttcaatttttatctgaaggtctgcagattttggggtgttttctggagctgttctttataaatgagcatctttgaagtccagaggtctctactcagccagtctgccttcacaaacctaaaagaaagttgagtgctcctcagttaccccagctgggacaaaggtaggtagtgaagcccctctatcacgtaaagatgctatggaaatgaaaccttgcttacaaaatactctgcagtccttggataaagatgaaaactcttaaaataagaaaggtccacaagacacctgggaaaaccagccctttcattttgcacatgaagaaaatgaaccccagagagcagatgaggaagtgtgatcckgtgatcaaactggtagttggtggcagagctaagactgatggtaataataacataaagttattacttaactcccagacttgcttgtgcagtcttactgatatcagacatttcttcattgaaccaatgactartgttgacttactttccctgccaggatattgacagagctgatccaccttggaccacttgaggcttccattacccagtaggcaaaaagaacggccacacagaatagaacgcctccagtggatttcaatttatttcattttacaataatcctagtgatgactaaagtagaaaccttttttcccaagtaagaaaattcttctggatttaacaacattaacatctttcactgccagttcgcttcctttttagcaagcatcttttcagcatctattgttttaggaactagacgggctccctcaaagtacttttctaatttttttccttagcattaaaggttgggagataataagaactgaacaaagcagcagttttgttaacttcttgggaagaaaaccttttcagttctggatctttttttttttttggtatagccttaaattggctataccaattggcattcaaatgacatggcattcaaatgacagcaaggagtatttcaaattcatttactggattagtcagtaaataggtattgcrtgccagctggctgccaggtcatgtgctgagggcatcctcagtgctctcactttagtaatgcccctgtggaagttcttgtcacattgttgatgggtggttattcccagagtatgcatttttaggggggcagagaccacatcttattaacttctgtagctcataattctcccagtgaggagtctccccttcaaaggaggaattttctccctcattttcttgccacccattgccatttggaaaactcagtgggccatggagaagccttagatctctgggaaaagaagtttgcgttgtacttcagttgggtattttgtaatgccatttactccctggatacttctaaaatgaaaatgtagcctgtaaggacagcacagagagaggaaatcaactacaaattaaaaagtgattagtgagtgtttaggcagaaggtcaaagggattagtttggacttcaaacttttcagctttcaaggtttgtattgagttacaaaattacatccctgaattatttgtgcaggtggcagctgtcagatttgaagaaagtttctgtgttttacaaaaggaacattgacaggactgggaatggggagtgtgctcccagggtgagggttgtcctatccacagcaccctggaacggctccagtcttgctcaatgcaagtgacagtccttgtctgagctgacacggccctgtccaggttactccaaccaccttagtgaggaaaccagtcaagccagttgattggcatcatgtaaacagcttgatagtagattttcaggactgggaaggaagagaactaatctttgttaaatacctgccttctgatatttcatcctcacarcttttcaaagtggatattggcatcctctttttagagttgaggctcagagaaattaggcaacttgctgaagatcacatagagtgtcagtggcaaaactggttttcaaacccaggtctgagttgctttcttgagatctgtgctcttcctcttacttggagctgtctttagggcagaaattcccaagaggatcccagcaaatgggttaggggtgtgctgaaatggatcccttagcccttgggcagctgggcagggtggggcatggcagctgaatcactgagcagcagtctcctcagcttgcctaggagtgccctatagtgtattttctaatagtatcactatgtggaaaaggctggaaactgaagataagtgtcttattcttagccatccggcctaaccacccatctgagacttgaagctrgttaggatccctgtaaacaattcctgatggaattgtctactctttattagggtatgggatgttgtgctgttttgggrgattgcattaaaaaacaggatttgggatgtgggagagattaggttaaaatttagaaagtggggagaaaacgatccacaagtcctagagtgtatttggtagggggccaggtcttccagattttggtttgtttcctatgcatttattcagtacacatttgttgaactcccactatgtgccaggaattcttccttgtatcagggacacagagataaataacatgaacccttttctgaggatcttagctagtgcaggagatttatgggaaaggaataattatgatgttagacagagggggccctcaaccttcccatctattaaatgaaaacaartgacattaagatctcttacagttctaaactttcatcaggatattactgttatgcacctaactccattctgagtaagatttatgatgccaacaaatatctgatggactttaatttttaactcccttctcaccttgcttttattttttattctttagaattagtgggcttctatcagaagattgtttttgttttgattttagatagctattgcttttaaaaataaaactctctgatattcccatttagtatcacatagagagctataagttgggtccactgtatcttctgaagcataaccatgcaatttattaagataagctgtttacctggccagtaaggtagatgttcattttgacctaaccaccagcctcatggagtcaatttggtaagggctttctatttcagcaaggctttgtttcacatccctgttcattttactgtgtgacctttggcaagttacttagcttctaagcctcagtttccccataactaaaatgcagaaatgaactaccttgccctggtgacttgacatgatctttgggtttataattgaaaacatagataggaggctcagtcttgggttaagattaagacatacgcataaatccatacacacacataaccatatacacatatatatacatgtctaatgtggccattacttactatgggagacattacggcatcaagagttatttctattttcataggtttacccaagagtcattaaccaaggactcttactctctacagcaaggataaagtcaaatgtttacaaagccaggcaattaacataaatgactacagtggaccaggtataagaaaattgacagtgcaagctcaatgagaatggcaacccacagacagccttcatgtcagggagatagtggggagtaggtggctcctggagaatgtgtatatgctccctgcgggaaggcagccgctgttattactgcctgcattgccacacactttagagctggtttaagaagctgggaatctggatgttatctgcctgttattaaatgttaacaatttaaaacattttaaaccctgggtaggccaaacggaacatctctacaggccagatttggccatgggctgccagcttgtgacctttgagctagatcgcgggccatgtagctcagtggcatacctggagtgcccttggattgctcaccagggtgattttgttcttgcagggcctcccataatgctcacctcttcgcttttggcactgcatctggctccagtcttgccttttgactatctcgatctttggctgtccctggtgtctggtgtcctgccagtccacgtgttgtttattctgccacatagacggggtgttttgtgtacacctgggtagcatggcttggatgggagtgcacatgctgacgaatgaatttttaactgctggaaaaataaaaataaatgtatttttctcaaccttattatagacttgcctccgatacagcatcatgtgatcttttgagaatatatggcagggttcccactgtgatgtttcttccctatgtcagggttccgggtcttgctaaccactgtcaaagccccatttgtctacccaatcccaagaagttcctggaattataggacttcatgagcatgcttttccctgcagattagattgcgtatgggaagtggctggtgggcccatggctacttgcatgagctttggacagaaatctggtcacatcttacccccacataaaagcttttggtggctccctgtcacatataagagcaagaaataacttattttatcaactacatcttagtcctcctaatcaactctgtacattgggaattaatgtgccaactcttattgtacagtgataaaaataaagttcagagagttaaggtcatacagcaagaatgacagttgataggagtggaatatgaaatcttgtctgcctgactccaaagatcatgattaaattggaaaaaataaagaagcaattaatcctgttagagtgggttacatggctaagtaaatcctttgttggagagatttaagtcttgaaggatatttaagtcttgaaagataaataggagttgtttwaattcagatgttaaagacattacttcatggagttgttaggaagatcaaatgtgatgatttatgtaagagctcagaaatactttgcatggatgggactattgctgtgtcttaactctgggtagccatgttgcaaatgaatgcctttgggtcataagggagacttatgaggcagagagagagtggctggatctgtatggttccatcttaacatctaaagaggagccttggtttctgcccttgtccactttcaagagtttcgtagctgactttctaggttgctaatatgtgaatagacatagttcatgtatccttagcaataaaggctaactggtcccatctctgaatgaattctagagtcagacagttctattacatatcttgtttatgcctcttatcctcagagtggatactgaaacaaattacaacctctctgacccttggtcttttgtctatatcctaataattaatttagaaaattgttttgagaattaaatcaattgatgtatccaaaactcctagcacatagtgggtgcccaataaatgtatacttactctcccttatttaaagaggattcaaaaggaaggaggtcttgggaagtgactcagctttacctgggatggaaggattatgagtcctgttggctctggtagttgtgtttcactagaaataaaacacctcatttgtgaaatatataatgatgacaaaagaggtttggagttctttcaattaaagatatgaaccatgagttgctggtcagtttgttttatttgcagatgaatgtggcaaccctttaaaaatccaacagaaagggctgaaacagctggagctggggattttaaggaggctgatgttaattattttaaaaataaaatgttttcactgtaagcactttcaaataagaaaggacatccaaagttctttttaacgcccatggtgaaagtaaaacaggtttctctttgtcatggaaactgagactttcagaaggcagggaactcaaaatcactgcagtattttactcacctttgttttccccagcacctaacacagtactcagtacttaggaaagagccatacttgtttgttgagttggactaaagaccttgatttggggtcaggaaacccaagtactaggactagatctgccactggtttctccatttctaccacgtagttgcttttggttccaacagtcttctttttgtggagaaagggcctgaactttccagtactgaagaatgagcaattgctaaggaagacctctagacccagaatattgcgtgttcacaccagccaacagcaagtgtttttcatggcagcctgtttcaaaggtagaaaaatgccttcatagtaaacttagttttgtctcatctggattgtgtccagtctaaaaatctggacaaatatcgtaaaccaaagaaagtttgcacacttctaagaccagtagcaattaattactttaaatagaagccctgtcacttacaagcaacataaatatttgtattttgaacctctaagtaatarttgtgttgaccattctggccttaagtgatttaaaaaaatcagtgagtgatattttaacagggaatatgtttataaagaaagggagggtcaggtcatagagtaagaaaatataagccaaaagacagacagatgtgggttcaaaacccagtgaccaatttactcacttgaggaccttgtaccagttataaaacttctggcctcagttttctgttgggtatacatgaaaataataacccacaacgtttcatagctatcgtggagattaaattaatcaattcctaaagtctaaactccttcaaggtccagggtcttcagtctatattttgaataggtggtccaaattgggaccattgctagctctgcattttaggtgaactgatgaacatttctgatcctcagtttttccatttrtaagatgggtagaacagtacctactcataactctgtactgtaggtaagatgtataaactttttatcacagagttctttttttttttttttgaaacaagatctggctctatcacccagactggagtgcagtggtgcaatcttggcttactgcaacctccgccttctgggctcaagttatcctcttacctcctgagtagctgggactacaggcatgcaccaccacactcggctaatttttgtttttttggtagagacggagtttcatcatgttgccaaggctggtctcggacttatgagctcaagcaatgcaactgcctcagcctcccaaagggctaggattacagaaatgagccaccgcaaatggccttgtcacagagttctaatagctgcccaatttgagtaattatgctataccagatgcctatttttgtgcaaccagtattattttgtggatagatgtgtaggctttctgcagatgttagtttaattattattctcgcagatcctggacttcacgtattttataatgactatggattgttttgagtggaaaattgaacaactctggaaaaggacatgaaggacctggtatgtagaagacataaaagtcccctcctggtgctctgattttggtcaaaaaatgcaaagattccttcttcacccttcccatcattctcttcttagcctcaccaagggctttctaaaaagcactttgtgagaaggaggctgtgtttaattttgtgcaaaggtgaactgtggctgcagggagcagggctttggggccaggtcacttgggtaacacttcccacatgagtttatcaatgggtgggccacaaaaacttagtctgtgtttttttacactccacccccaaaccacccaacctgccccagtgttagtttttcaaagccagagaagtttcaaaggcctgaacccaacacaggggcctttcttcatgctttgattttatgcccattaagtgtttgtcagtgagttcatatttcacctcctctgcaacctacacatcccaagaaatccccagaggtatatgaagttaattgatccttgattaaaggaaggagaaatgcttgggtctgggtctcggtctgcactcactagattcttttttttttttttttttggtcatgctttgcaaaaattttgtaatgcaccttttattacgaatacatttaaactccaggctattgcrttcagagtttgatgaaattagttacctagcrcatgtgtgatacacagtgaaagttcagttaacttgagccagtgccattcccttgattgttctgaacagtgcctttttcatcagaggccatgagatttgctgagcttcagttaatttactaatacttatagatgcttccttctctgaagagtgactcacttactttatagaaagcacccaaaatcagagtcagatcatttgaaacctgttcagctccataacttacttgcagagtgactggtaagtcactttaatctctttgaaccttagggtggcttaatgtattagtttttatgactgtttatcctattagcctttgggccacttgaaggttggaacgtagcctctttcatttcagtggcccagtcaatgcctagactgtggtaggcagccaggtttgtcagtctacaatagtttatatggggaccctcaagacagtttgggcacatactaacttactaactgtttagtaaatgttacctattatttatgctttgtgctattttcgcctttctttccttcattcccttcatctcctctagctctatagcaaactttaaaattgtatttgtttaatagccatcagttttgtgactgacaatattgaaatccctaaactgcactgatttttttatggttgtacttagcccgtggactctagaaacccctcctacttatataagggttaactgaagtctcccaccctctgttggacaccttgaaagactctagtagaatagtctttgtgtccttggtgtactctatgcatatgtcagtcatcacactagaaataattcagggttcttgcttttttgactatcttacaacactgtgaactcctccggggcaggtactatgatgtattgacttccagaattccagtgtctagcactgggaaatttctccaaatgaagtgataagggactatagtaattggtaataaagatggtgatggtattggaactaaaggttgttggagaagaacagcctcttctctgtgtcctggaagggcaaggcacagtgttatatctctgcctagttgcctagttggactagctgcctagttggggggatgtttatgcttttcccatcaactgaaggaaatctgtggttactcttcctggatcaaaatcaagatttgactggcatcaccctcaataataccacaagtttataggggagacaaaaaaaagccatcgggttttgtaaatgccatctgcatgcctttcaagaaaataaacagaacatattcagctccaatttcttgtctgtttgtggtcttcatccacataatcagaaccggaaaccctccccaagccataggcaaagaaagaggaaaaaggatttggactgttctcagtttaaaagtgggcaaaggactgaccagatttttttcccttgccttctctgtgaggcttttttcccttctctttttaacattcattgagtgtccacagtgtgtcccggactctatgctggcattactcagtgctattgccttgactttcttctcaactgattttgatgatatgtgtcttcccctgctggattgtaagcttcttgagggcagggtctgggtcatctttgtgttccttgtaacttaatatatatagttaagcctcaataaatatttgttgaatgaatgctttaatttttatataatcccaaccaccctaaagttagatttcattcttcccattaaacagatgagaaagggagttttggagatgtgaaataacttactcaagtagtagggagcagagtcaagatcattaacccagttctgtctaactccaaaactcttttatatgtgttttattgtccatagaaacatatgttttacaggcctatcatgtgagcactattaaaaatagaagctggaggtctgagagtggagtgcaaatgtaaggaacttggggtctgttcccttcctgagtttattagcaacactttggctcctaggcaccagagcaactgcagctcaacttttaaatctcaatatgtggaactttaaaagcagactattaataatatcatactgctggcttctcagctacttttcatagccaacttggttgcatttcaaaatgtttaggcagtggcatgaagatggttcgggaccatatgatttctctcccaggctcctaacccctaaagatcatttctaagccagaacgtttatccactgcctttccctgcccccctctcctccattgcagagacaaagttttaaaacctaatggctattgcctgtcatggcccctctgtgtttactttgagaaggtcaggcacaatactgtggtgtgttgctgttctttcttttcaaagcaccagtatgaatttgataaagtaaattgttgttctagcaggaagcagttaggggtcacaaaataaatagccatagaattcaaataaatccaaagaataaaaccaaataaatccatgtgtgtatgcacagtgatacataaatacactttttagaaagtgagcatttttatcactgctggtctggaccaaagtaattgaaaaattgtggagttcatggtacttttttttagaggtggtctgggacttcaagcaacatgatgtgaatttaattctttttgaaaaacatgaaaaatgggattttatcttttaaacaactgtttatcttgggatttttcagctaatgaaattcacatttgaatgaaatcaatttgcaaagttaaattagggatttaagcatttggaggtggactaagagaccctgaatgagctcagtattctctctgagtctctgttccctccacttgaagatgggtggtagtgcttaaataatacttcaatgcaaaaatggatataaagaacccaacacattgtgagtgtgcattcaatagtggctgtattatccactgtgttttttttttttgcagcccaraagtcttgtatttattttattttatttttttaacatctactatgccatgagttcatacgttccagcagcaggctccttccccttggttctcacaaagttgcacttctcttggtagagcaggctggcacttcagttgaactctttggctttctttttctgatcattttccttcatgttttttaggaagttatctcagctcttggagtgcttaatgtgctcaatatgcacattaattctcttggcaagaatcttccccttaacttttttgtttacaacagtaccaacggcatgctggggaacactgcagactcttccagtttagccatggtaacacttgtggggcattctttttagagcagtacccattcccttagatgtctacagcatcacctttctcatagattctcatatacgtggccaaataaacaactccatgttttctaamaggcctagagaacatctatcgggtgcctctyctctttccctttgtgtttgtcattttggtgaattactggaagatggcagttccagctgaaaggccactgtgtttttggtggtcttccctagttccaagatttgtaaaagaactggtccttttactttgcgaagtgtcattggagcttggtattgcagttgggtagttggggaggaagaggtattttggtctaagagaatagcatgaatccacagtctctgtgtactggtttcttggaggcttactgaagaggagcagcagagcatgaagctggagagatgtccaggtcatgggaactcctaaagtcatacttagggactttatttcaccctgtgtcatggggagccattgaagaggctttagcaaggctttgacatgctcatggtccaagcccttcaggaagcaaactggtggctatctgtagaagggaatgggggccatgagcctgattaggaggctcttgtagcatccagacaagagttatcatgggcctttgctttttaagtcaaggttgtgagggacttttcttggcaggtgatggaatccatttgccatgacctttgagagaatagtatctgagctggccactgataaccagcagcaactgcaagagtcacttggttctcctgggtgccctgggccctctatccaggtctgcaggcagcagggccaagctcagctctgctcactcttattggtagttctttgaacagtgaaagaaaagcctggaaaatggcattcatgaagcagctactatgtgccaggcactgtgctagaggttgtgtgtgygttgatctcctttagtcatcaccacaactcattttactgtgggaaaaaactgggactcagggaaatggagtgggaaccagaggaagtgctggatctggggttcacatccagatttttttactccaaggccttcactaccccaggcagcacagccttagtgaacttctcaaaggggaaatggttaagagctaagaaatgaatgcccttggaagcataaatcatgagatttggggctatattagtaaatgttgcgattcgggctttaatttttagcagggtattgtagaacagtgggaaaacccctgctctggctctttcactgcctacctccgagctcttggggaagagaagaggataatgcctctctcctcatgggggtgtggaaaggaggaatggggttgtgcatagcgaaagctctctctaggcagtagatctctacaaatggaaggaacgattatcactctcagtgatatttgggatggtcttttcttgaagttcctctttggcactgatgttttccccttcctttttttctttttttttctggtatatgccatggttccacctggaccagcgggcctccccttcctcatcatcgagacaagcaccatcaagccttaccaccgagggttttactgcaatgatgagagcatcaagtacccactgaaaactggtgagacaataaatgacgctgtgctctgtgccgtggggatcgtcattgccatcctcgcrgtaagtgtccagaytctgctatggtggatcctgtctgacttcttcctgtattgtcatattatagaatgtctgagccaacagagacttataccaagtagaagccaactttctctggcctatatttagccaagaaggaaggtagttaatcctgagaacactaaatgtgaagtaagtgctatcacccccattatacagatgggagagttaaatgacgtactcaaagactacagctacaaaaaattcaggttcagcctgtgcctggctgatttcaaaccccctttccatctcgcaracttacakttcaggaagkctaacctgtccaaatgaactgctcaaggggataggcagttagcttatcttgcctactctggatcaaatgtaagctgctgatgttacatgtaccacatttcatgtagttttcttttgacttgcccactctggaggttggttgtaaactttgagacccctctttgttttttaataacatcgtaaaccaggcacacaatcaacagcttgaatttggggagggggaagggaggctagtagaattctttccaacctttaaaagaaaaacagtccatttgscagtagtttcttaaaggtggactaaggatctttgtgtttgaaaactgaaaaatgaaaggtctagttttcctgtgtgctccaaattgacagttgtgggtttgagtttctaggaagaatggctttccctgaaaaaggtgtttgttgtggaaagcaaataattgcacagtatcatgtattgaggtttgaacaggtgtttttgaaagttggaggatcagttaattgaacgcttcaaaggagcccgctatacccaagagtgtggtgagataagaaaagcacagggacaggaatgtcacatgctcgtcactctctgtggcattattcccagcttgcctagtgggctgctcccagacacagggcagtggaaagagacactcttcagagcctctcgtagctatgtgaattaggtggatcattgatttctttaaccttcagtttcctcatctgtaaaatgagattgctgtttggattccctcaagaggattgctgtaagaatcaaatgaatgccataatgcctggaattgcactctgcagcagtgggctcactggaacgttgagagtcttttagttgggaatggttctggttttctgacctggccccaggatgggcaaaggaaaatgctaaagtagcttctttagagttcatgtgtctcctcccatccttccttccccaagcagagcttcagatcagcagctcttcgcttgctgcttgccaaggccaatccctttctccttaagggatgtcagcatttcttagaaaaaaatgtgctattgagagcttcattgtggcttgcccctttccttgtgttatgttgatattttaattacaatgcttcctgacctcccaggttttcttgaagcagtcatgtgctgtggcctcattatacaatgagcaacagcattgcttccccaacccatacaatggcagcaaaatggattagatagtgctttcctatagttccggagaaacacaagccaagaaattactgcaataattgttatctcttgtccagtgctactgtgtatggggatacaygtgaaaaatgtggatgcatttcacccttgaaaccccaagagctagatattcttagggttttcagtttagcacagggttaaaagcacatgccctggttcagacctgagcacctctgctgtggaccatgtggcaaattaaccttatggtgcctccggaaatacatctgttacatagagatactatgtctacttactaaggttttgagaattaaatgagctaatgtatataaagtaactcagtgcttggcacatatggtatgcccagtaaatgttaactatttttattctaaatgagtaaacagagtcaaaaaatggtgaagtgacagccagatgttatatctggtaaaaatacagtaaggaaaggaaccccagccttagctacaccccccactcttatcttatagttatttaattagaacccaggtctcttgattctcactcctctttgcaataggaatttcttacctcttggtccaactgctgttgcatttcagctggagacacgtgaattgggggctcctaatgaagcctcctagcctgcttacctgtcataactatcaagggtactcacagaaaaaggtaaaagcaaagacctcagaggtggaggggataattcacttttgcattctcagttctggaaaagctatagagtttaaatttaacaacaacaacaacgatgacgtcgacacatttcccactttcccagctggccccatccagaacccggttctgattagagggcaagagtgacagacgtggagggtggaggggcccagagctggaaattgaaccatcatcctgctgcttgcwgtcctgagccttctcctgctgaatgtcaggtttgtttaaaacagcaagagaggccttgactgagttggatgcccctgctsccattcagatggtccccacaacaaaggaacggaatggcagtggaggagaccagtgtggtttagagatgcaaatcatcacgcgttatggagaaagcagacacctttcaatggcaggagatatggaaaaacctagtcatgttgacctctttttcagatgtatctcagattctggaattatagcataataggaattccttccaaatccacaaagcaatggttcctatccctgccttgcaaaggcttaatgactctagcagcagtaagactaggagcaaacagtaaaatatcatctcctatctctcagttttgtcttgcactgtattacaaagagtatcatgggcaaagatttaaaatgggcagaaatgctaagtattcattttaaatatacatgggctcagtgcttgcctcgctcagaacctaaaaggggtttatacagattcttaatatctaggaattgatgcatggttgagtcacggatgaatctccttctctccctagccataaaaatgctacctaacttgactctgacttctgtaataatattcctaactagagaaaaagtcaaacttaggcatcatctgacttaggtacatgtcccaacttgagtgcttactcattctgtgacttgtccttcaacctcagaagagccattgggccccttggagctatactttgcttttctataaattggtcacaacggttcaccaatgccataggcttgttttgrttgtcaaatcatgtgatattgtgtgtgtgataagtgagaatcatccttcatatgtctgtagtgttgtacagtttacagcgtggcttttatgtgcacgctcttctttgcacctggdagtaatcctgggaggttgattcttacagctaactcaaccggggctcaaggatattaagtgactctctcataactaagtagtggcatggccagaccaggagtcctctgattcctactgctgtcttctgcagcctaccctccttccacaattacttatcaagggcctatgatgtgtcaggtgttcaccacacagtagtgaacctcagcacaaccagctgcatgttgtctcttgtcatgaaacttagcagctaccccatctcgagcaggcaaataacaccttaatacaaactgtcataggccaaggcaggtggatcacttgaggtcaggagtccgagaccagcctggtcaacatgrtgaaaacctgtctctactaaaagtataaaaataagctgggcttggtggcacgtgcctgtaattccagctacttgggagactgaggcaggagaatcgcttgaatccagggggtggatattgcagtgagccaagatcatgccactgcactccagcctgggcgacaggatgagaccacgtatcaaaaagaaaaaaaaaaaaagctacataataggttgctggaagacggggccaggtcttttcctctgggcacatggtaggtacttaaacaccaggcggacatttctccaggaagcattccgtasctgtctcctcccccaccttccaaaggtcacagagaaccctgggcccacctctgtggctgcagtcactgtgctgattgtcatgtctgtttacttgtatatttcttggctaccctgttagctgcacaggggagagacagatctgatttgatttggtattgctagtgtgagacatagaccttggtgctcaatatatgtttgtgaaaaatcacagaagaggccataaactgggggcagaaaatcaaaagcattaggtcaaaagatatcagaggattcacagagcaggggaaaatgtcctgttttcttccttaaaatctcaactatgctccaggaggcacatgggaacacactctgtaccacatgcaaatttcttgctggagagacaagaagaagagcttagtacctgcaagacttgtttattcagtatcatgcttcactttgcccacatctggacttcattagttcctccccacccctccatctccctttatctacaagagccctgccaagaaaacaaggttcctcaacattgcctcctcattaaaggctagtcgagttttcaactctgaaaaatgtgcagttgtgctggcccagtggtgcattagtgggagacccagtcccccagtttacaatccactacatctgtgcaattaccaagaccaccaacagagagaggccacattaatccttcaactgtgttgtcccctgatcagatggctacagagttcttctragaccttcttatccctgggggaacagtgggagggggcatctatttgtgatttaacaacacaggcatggagaktgcactaaattttcatctgttccctttctccaccacccrcactcactctcatgtcctggaagaagtgagaacagcagcaattcttccttagttaggtacagctcttagrgattcatgactatttgaaaaacgtatcaatacggaggtgatgatatgctccatttgaagtcataatgcttaggaggccgagaaatactttctgtgaggggcagtgtgtgttggggatggggtggagagtcagataacatttatgagctatttaatggaccagaaactcatgtcttatcttaaatcctcttcaacagctatgtgaggttgctattatttaccacatttgacaaatgagggaggacactgaggcttataaggttgaagtgactagcccgaggttactctgcttagtgaatgggggaacacgaattaaaacctagatctgtttggctttcaagcctaagtgctttaacagatgctaatgaaggcccactctggtcggtgctatgtagagtgctctttatttagttagctataaaagcttttagttactgggcttggagagttaaatgtatggaggaagataaaacatctagaccactgggcagatgactgcccaagattgacagtgtgcatcaatggtttgtagagatggtgatcacctgctgtgtgtaggtaggtgccgggtgawacctcccttatagmaagcaggctttgtggtaggcaccttggcctataagctgatgtgtaaaatacagatcttgcctttggatcttatggtttaaagggaattcaagacaagtacaagtctgactataggattagaccctcaaggaaaggaaataattagtctgagaataagaggagagtcagggcagtgcatggtggtggctgctagggaggggagagcttcaaggacgaaacatatcagatgctgcagattgtctgaggtctaaataaagtgctatgggagttcagaggaagagcacttaaggctaaggcttatgccaaggcttcatcatcatcattattcactgagcactcgtctcatataattttcaccacaaccctgcttttgatactgtcatcatcttcatttttagagataaggaaactgagacttagagagctcagttgtacaagactcataagtcaaagagccaaactctaacccagaacactagttggcacttgagctctactttaaggcataagtaggattttcgtcagagaacctgacctaggcagaaggagtggcttcagccattttagagacttcaaaacaatgaagtgttttcagggaatgtagagcagacctgtttggctgaatgaatggaatataagggagtagacaaggttacagcaggaaaagaagattgtggcaagatcgtgaagacccttgaatgctgaggaatttttactccagctaattggctagaggttgatgagagtattttaagtgagcttggtcaattttctaattaaggtaaagatgaggcctgaaccacagtggtggcaatgcaagggaaatagaaaaagatggatgcaaaagaccttgcaaaagccggatggacaatgggataagggagaggaaggagtctaagattgcacatctttgtcagtcatatgcttggtggcatcttgagcagaactagagggaagagaagtgaagtttgggacaggagtgggaatgggtgtgaccttagacttggttaatttgaaatggtactaacatctccaggtgggagagttagcagaagattggaattgggccaattaggggaaaggggtaggctgaagctagagagagacagagagatgcccttttgaaggtcatcttcacagaggtaacaattgaagctattgaagcagctgagatcacagcagaaagccaggaacacaatcctagggaagacccacatttattgggtagaagtcagatgtggaaccactagaagaagcagacatacatttagaaatagtaacaaaagcatggtggtgtgatattaaggaagcctaggaaattcaaggtaaaaaaaaaaaaaaagagtaagaggttgcagtaggcaatgctgcagaaagaacagccaggagattcttgcatggactggcagagttgggcattcaggaggcccatgactctgagtccctgacttttgggaaaacaatgatgctttatgcctcagactctcttcttcatgagacttgtgggcacagggcagccactgctaatttcaaccataaataacttctgtagcccctctctggcctctttgctgtctttattctagatattggagttctgacttacccataaagcccagaaattatactggtgtctttggacagatctatgtcttcattacctttcccagacagtgaggcactgatcttctgaaaaaggctgaagatgataaccaagtgacagaagaatcagagaataaatttccaatcaactatttctagttactaaagacgctgcactttattgcagtagatggagcagtcagtgccagagaaaatacagccatacatctgtctccatccttagaaacaggacccagtacattatatttttcctttcctttgggactgagaactaaagtgagaaatgtgattctcccttcacgattctccatcatcaacagtttgttgaattaatcttttctgggcaaaagaagttcatcaattcatgtaaccgagatgtaaaagaacaacttgaccctctgtggctagcaggaacttagaggtgcaggtgcctttcaagatggcaggcccttactgggtgttctgtgaacatmtgtctctctggagacatacatactactgcctagtaggacttctaagagaaagccagctcgatgccattgggaacagcacaggaattagaasgaggaagccccagcttcagtgatggtcttcttgctgtctcatttttatcagagtgattcactgccctctctggccttcatcatactcatttatataagtgttggtaataatttagtaattcatatggtgttgtgagaagcaaacagtatagtggatgtgaaagtgctttgaaagctgtaaagtactaagccaatattattaaagcagatcagagtataggaaagtttgtccttcagactcagyggtggaagatgagttctcagtctctgaaagagattgttaggctgctgtgcaaaaatattacttttcttgggataatttacaaatagagtggaatgttaaaaataacacaaaacagtagagtagggttgtcccttctgctttgggtttagactttgcttctgtcttgatctgctgaaaaatacatactagataaaatgatcaaaagcaatgtcatccatacatacattttctggtcctaccctggaggggtggtatttccaaactcttcatttaggtatggtatcgtccaaggagctcttggaagagatactctctacaaaacatgttttttatttgtttgtttgctttcctcttcaatggagggaagaaaaaagttaacttttggagggctctcctgctaggtgccaggcgattgacatatcaccttatctaattccctggcaatcctgccacatagatattattaaccttattttatagatgaggacatctaagcccagagaggtaaagtcacatgcctaaggtaatagacaagattcagacaggtttttctggctacaacgttgttgcttctttcaccacctcttgctctatcttttcccaaaaatctatcctwatttttcttcatatttcctctccataacagttaaatatttgtaaatatgtgggcagttgagctctttttcaccagaaaagacaggaagaggagctgtcttgcagttggagccaacctctctccaaactgcagcccttctcaggcaaggactgatccctttctgtccccttgtagcttaattgcaatgctttcccattttattagtttccagattctgtgccaagtgctttaaaaggcaggtaggggagaattctctgcttgcctggcagcctgccatcacccccagaatctgttgcttgctgtttcagaaagggatcaacattgaaggcatttttctcagcagtgaaatttacatatcagaaccttgctgactgaggcagaaatgagggctctaggggcaggagtctgggagtggggacagagtctttgtaggaggagggggagggaagagcttattttcttacccaggaataaaaacattgtgagtaatgaataaagtccgaaagcagtaaatctgggactcgagagttaggtgtgtaacgtgtcggagaacaatttaagccttcgcctcgtctgtagaggtgaggtattcaggctgcctttcacaacccaaatttcattaaatagacttttaagggttaggattacaagaagccaagtccgsctggttcataatgatgatttatggctgtgttgtcgactccctgacccttctgtacaagggratagagaaaatacataatttgttgctcattcactctaaaatctgtcaaggctgccccagaagccatgtggtcctggagtcatgtgtctgctaaatggcttcagcctggccctctccttaaaaatctgcaattgctcttctgcagtggaaattggttttaataacaatagaaatgataaaattatctcagtgtagtctgctgtgggtctttgagcttaagagtcagaatacctgggctctactcttaactctgtcacttactggcctcaaatccttcagaaaagtcactgtctcccagagccttagtatctccatctgtagaatggaatatcttcttcacagagaagattcaatgaaactacagtacaaaataaatgtaagagatggctgctgttaacattattattaggaatttgaggtactgcaaaatgttcttttcatctccttgttttcccttgagtgaaggaaacattttactttkcaatttactatcttaagactgtgacactaaaaatggaagttttagagatgggacattagagctgaaaagaatccctgaattgtaatcaaaccccgtctccctaaagtaactggagcagaaaggtgactcatctgagattaatcagtaaattcataaaagagatgctaatttgcattggaaactcacatgttctttctcagcatcaaacaggaaatcgtgttgactgatcctcaggccacacctgcttagaaacagttccttaatctgtagcagtgtctggttcagggaaccagagagcaatctgaggtcagggattttatctggggccttggttctgctccctgcttctggtgtcatctctgagcaagtaactttcctctgccattgcttattacctgtgcttggttggcaggctagtggtggatggtggacgtagcccaggaaagttgagaataaatgtcattgcagttatgaagtcataaatcagagtctagcaccctcgttttgcaaatgcagaaaccaatttatcccaaattcactaaacaagtagggacttgaacctcggctacttgactcctagttcagtgctcttcctcctgcataaaaaatctcatatgacttataaataaggaagaataaaaaagattaagagaacatgattgtggtaataaacatctggaacttgtttgcctgtgaggttacatagggtaaatgtataaacaggttcaaaaggggaattagatcatgaatggtaggaaagaatgctgggcagggagtcagtgcacctgggtttaatctttagatgggagctaatttggacctaagtttcttctaaatataatggtccctttcattaatgacttgccatgcttcctggagtttaatctctgcaacgtgttatcaaagcattcttggtaatgttgaggggatacttccaattttgtaataaggcaactctgaggactaccgtcctgctccctttccttcatttgttccttcaactgatagtctttgagcatctatgcagggtcccatactagttttgctctctcaggaaacggctatgccaagatgctggctagagtggcctttgcctatgttcctctaatacagaattgtactcaatatgttctgggaaaacaaaatgtagctcttatatataaagcatttatgaacacagagtcactgtgtcaatgttggcagtgataatagctgttctcactgctgcacctgtttgtccctgggcccagctggtgtttccttcctacgtggtcgtcctcccccagactttggagcccttgaggaccttgatcagacctcatgccttgatgctttcctccactgtaaaagaatattgggagcctttgcaaaggagtgtccggatatgccagactattgcttcccttgtggctgtgcacatgctctcttccctctgaaagggcaagtgtaactcatcatcctgccctgggaggaagtgtgaagggacttttgtggtgagtgatgagttgaccatcactgtctctgggctgtggttacaagcaggaagtggccatggctgggctgtggagttaagacaaaggcagcagggtgtgtggttgtgcacatcataggcatttaccttacagaacatcagctgtcccccatccttaatgtaaatgatgtcactatatctatcttgagcatcaggatttcgtgacataaagaatataaaagcaatgtctggtatataataggtaatcagtaattggtggattattttcagtagtgataaatctcctctaagcatcatatcatagatacagtatgaaaatcaagaaagatttgagaaggatcktcaggctcagagaagacagcacaggctgactggaggaaattcacaaacactgaagggcatcgtactacaagtttcttagttgttagactggtattctattcatcacactctgcttctaaaaagtaaaagcatcactttctgtgatccaggtcatttcccattcatgttatcctatttgaaccaacaactgcaaaggtgagcagcctccttttatggagcagaaggccaaagcttggaggatgtagattattgctgaaggataccagattggtggcagagtctgaattccccaggacttaaccatggtgtgtccagctcttcttacagaaactctcaccatggccaatgtcagcacaaggctgaggcccttactagagtcaggtcattgttggtgatcctttaccccaaatctcagaatctcgagatttgctcagaccctgtgacatcatagctaccctttaccttgtcgttgattcttcatttagtatttcttttctatagttaagttcttgtctctcccttaaaaaaaaagatacacacacacacacacacacacacacatacacatatatacatataaatatatttggttgtatatttttgttgttacaaaggggcttaaaacacccaactatattagygctttgatcttttcttctgtgcatatttgtgtctgtatatttcataaatagaaaattaggacactcctttgcaaatactgaatattctcctgtgttgttgaatatccgttacggcatcagtgttgatgatgaatcttgatactgcctaattcccctgttggattccttttagatcatcacgggggaattctaccggatctattacctgaagaagtcgcggtcgacgattcagaacccctacgtggcagcactctataagcaagtgggctgcttcctctttggctgtgccatcagccagtctttcacagacattgccaaagtgtccatagggcgcctgcgtcctcacttcttgagtgtctgcaaccctgatttcagccagatcaactgctctgaaggctacattcagaactacagatgcagaggtgatgacagcaaagtccaggaagccaggtgagacaccacctccgcatggccagagcctggacccctttcatacagtgcagttcagtgagcacttactagctgggccctggtttagatgggtgaataaggcatagttcctattcttgaggaactcacagtcagatgattgagacagatatgtaaatcaatacttccgatatagcatgggtaggtacattcattcattcattcttttgtttattcatgaattcataggtgcctgctatgttccaggcatgggtccaaagcactaccaaggatgcaaaaatgaacagggcctagtgcctgctctcaaggttacagtctagggagggaagacagacagacaagtgtgtatcagggatgtgaatacggccctttcatggccctctcttgctcttgcaggaagtccttcttctctggccatgcctccttctccatgtacactatgctgtatttggtggtaagtacccaccctttgatttgagcagtgctcagttccagcttcgatcccttctgatatgatagccctcaaaatagtttaggggcatgccatcactgtgaaatccttgaaaaagaggttagctagaaaagttaggtttaattctgagcgctgccactgccttagcagaagttattttactttctagttttttcccccatttttcaaataaaaatagtatttgccatagctgcttgataagcattgtggacacattttggaattttaaagtgatamagacacttgtattaggttggtgcaagagtaattgaggtttttgccgttacaaaaacccctggactacattacttaaatggcaaaaaccacttactcttgcaccaccctaaatataacattttagggtacaaacactgttttctgaaaatctatggtgggaaaagattgctaagtaagtctcagaaaattaaagtgaactgccaaaatgtacgtaacagcaggactgttgctcaagcccaagccttctgataaatttttttgcaacgttcaccatgtcagtcctctatattctacggatggaagggctttaaggatcatcattacctaagtatttagaataattttgagttttgcaaaatacttctgctccatgaggacgcatgacttcataacaacactgtgaagtataaaatccatgccccatttctcaaatccacagaccaaggcccagagaggataagcagcatgtttgagttccttcaaccagtagtagaaccatgatttgattcccatgctcttctcatggccgtgtctgctctgatttcctggagacggttgggtaatgcaggtgaagtgccctgcttgcctccagctgctggacagacagagggctggtctgtttttctttgtcagttacatgtgggtttccctgccttgcctttccccttgaatgaggtccgtgtgtgccaaggcacttcctgctttcagccgctttgatagaattcagagcgagaaggtgctragaggtcagacatagctcagaggagcacaagctgtttgaaaaaagaacattttgatttcaacttattgaaaaagcacaattaggaattgggaaaaacagcagaaagtttgttttatttatttatttttccccccaatcctttctaagtttagaggcctctaaactaagccaacattggcttcccattaccgaggatgcagagctgaaagatgagccccaacttatgacaacattaaacatggattttatgtgttcatgaatagcacttccctccattcttcatctttttttttgttttgctcttagaaaggaaaatttagcaaagatatttaggttcctgctccctttgtgtattttacccagggctggaaacaattttaaaaatgtaatttcgatgttttataaaagtgcttagaggaactgggtatgtgttcatttttttcatatcccttcattttattccaaatgaaaaatactggattgttttgaagccagcactgtgcactgtagccttcacagctgcgcagcaggtgaagatgctgacacactttggatgccttctgtgtgccaggcaccatatctacttactctgtgacatttgcttctcagtgacctgatgaggtgcattttgattatcctatccaatttgaatctaagaagttcagtaacaaaagttctaccatcagtcagaggcagaaaaggtatttgcaggccagactccagcattgttttatgttcttttcattgtactgtgctacaaaactcaaaacaaacaaaaaccagacctcttcaggttgaacttaaggaatattacctcttaaccctaacttaaattttgcctgaaggagacctgtctccttttgctttgatggttgagatgtcccctccctccggtccccaactccaattacctccttaccatctagagatctctgtggggatgatgggtgagaggtatattttgattgaaggtttatttgcatccctcagagggaggaaaaagttgtagtgcttccatattgctggaaggaaggaagagaaagagggaaggaagagaaaagggagagaggaaaggaagagagagggagggaggagagcctcctttggctggatggtggcttatacctgtaatctcggcacttaagaggccaagataagaggatcccttgaggccagcagtttgagacaagtctggacagcacagggagaccctgtctctttaaaaaaataaaagaaggagagcctccttaatccatcctctcctcagcatgttattatatcccccacctcccaccccactgtgcacatacgctcttcagaactcttgcacaaacacacattcaacactcacaactcacatatacaacatatatatacacagctctatttttagctctaaggttatcttgccctaaaacaacctgtgaagataagggtcaaaaagtgaggacagcactctctgccagggcatgtgtttatgtgatattacagagaaatcccagctcttgtaacatctgatctgcaaaactttctttgttcttcttcttcttttttttttttttttttttttgagacagagtctcattctgtcactcaggatggagcacagtggcaccatcttggctcactgcaacctctgcctcttggactcaggtgatccttccacctcagccacctgagtagctgggaccacaggcacatgccaccacacccagctaatttttgtatttttttgtagagacgaggctttgccatgttggccaggctggttttgaactcctgggctcaagcaatccaaccaccttggcctcccaaagtgctgggactacagatgtgagcctccgtgctaggccgatttgcaaaagtttctttttttttttttttttttttttttgagatggagtctcgctctgttgcacaggctggagtgcagtggtgcaatctcggctcactgcaacctctgcctcccagattcaagcaattctcctgccttagactcccaagtagctgggattacaggtgtgtggcaccacacccagcaaatttttgtatttttaatagagacagggtttcaccatgttggccaggctggtcttgaactcctgacctcaggtgatccacccacctcagcctcccaaagtgttgggattacaggcatgagccaccacccacctcagcctcccaaagtgttgggattacaggcatgagccactaggtttggctgatttgcaaaactttctaaagaaaattgaaaggacacaatttcggcccaccagaggaggtgggaaactctgcagtcagtccgagaagcccttagaccctcccccagggcttttatgttgagctgcaggaagttctggagttgggcaargagactggactccccggtgtacccagtgctgtttttttgttcatgcagcctgtgattcatagcttccctggggtgttggggagaatcacatttgggtcagccaggtttagcactgacagttttgtctttagaatcaagcagatgtggaatcaaatctggctgtatccatgaccagctctgaagccatgagtgggttacatagctttagagcctcagcatactcatctggaaagtggaagtgatcatgtctattttgcagagttgttgccacttttcctctctggaccccactttccccatctgtcagatgaaagagtgggatgagatggcctgtctatttatctctcaatcacaatggctctatttgaaaaaagtttgaactgccctaagtgctaaaaaggaagatggggagccatcaagacaaacttaggcctacattaccatcgagttcagagaatggcagaccggaagcaccagccagctccactccaggcttttcacagcagccacttctagaggctccataactttaagggcacttcatgttaggtcaatgaataaattttgccaaatgatgagcttggaaaaaccatgccccaaacaccaaattatcctgcacacagaagcttaagggtgaggttaaggcttgttagagattaatgcaagttctaattaaaaaaaaaaaaacaaacccacagcatatataagcacaaagtatgctttatacctctgagccctggcctgaaccccagaggaccacgtctgtattgaccctgcacctccatggtcggagactgaggatgacatgctatctggataaaatgtcaacaccagggcagacaccaattcatgcagctgaatgtctgctgtgttgtgctgagccctgcccttaaggaactcacctgtgcatccaacattgagcatttggtatatgcttagtgagggactatgatgcaccaagcaccagctaggagtgggaatggggagatggttacagcccttgcataatttagtctagagaaacagtacacaatgataatagtctgatacattgtccctcaggggcaaggggatatgtaggttatattacggactctcagaattatgacccctaggctcacctggagcagagagtggcagtagaggtagttagtcacatgaagatagaggagactggaagaactacatgtgtgaaggtgaaaaggaggaggtgatttggagaactgcaggtattcagttcagtacagcttggatggctgctaggaaccagggaatggagggcacgcttgagagtggaaaatacctttgggatcagtcccagctcctcattttgcaggtgcattaggcagccactttgtgtcaaggcctttccttagctgctgttctccccgcaccccaccccgaaatctgcaccttgcccccacccaccttctttagaagcctttcctgactaccctgtttagaatgacaaccccctcctctgacactgttctccctatgcccctttgcagccttacgtctcaccatctgacatactacatacttacttgcttttttgtttcttccaactaaattataaattctggctgggtgcagttgttcatgcctgtaatctcagcactttgggaggccaaggcaggagaattgcttgagcccaggagttcaggatcagcctgggcaacatagtgagaccctgtcwatatatatatatatatataaatgattaaaaaaggctgtaaattccccgggggagagattttttggtctcttcattcactactatatcctacttcccaaaataatgcctgatacctagtaagtgtgcaataaatatttgatagatgaatgaatgaatgaatttcaggtcttctgacactcgggccatccgcctttccattctgatcagaactttttttgtctcctcatcacggacttgatagattgctaagggcctgtgtaatgtagggaaagtctttgctccctctttgctgagctctctccctattgaccctttactgtgctgtcccaggagaactgtttgtgtgtcagagggtttgttgggtgccaaggaaatggaagtggctgtgctctgacagccctttctctgggctgtgcttgttagccattgaggttttgttcagcatgtatggcgccctggagcctagggtctggtatgcccacgaggtgtacccacagatcctgggagcagctgtagaaactcctttggggagcaagattgttgtttccaaggggaatctgtaccagatgtttttcctcttttttctccctatatcattcactcaccccaccacacatccatctatttctgagtacctcttctgtgacagaccctgtgtgagtgcctggggacaccaaaagagctcataattttgtgtggaaagccagagaagtaaatagtggccaaacagctggatgcattctctgcttaggggtggactcaggggatggaagtggccctcacctctgctatgaggtataatgagtcagctcttaggctcccttcagcttcagatcaggtcagagattattccactgtaactcttacaaaagctgtacgcttgtgtttcaaatgtggaggttgatggaagtgtgtgcaggtgaattagaggagtctgaagttctaaatgtcccctggaggttgtcctttggtgttttgccctcaaactgcctcttttctccaaagacagaggtccagtataaaaagactaagactttatgtgaagcagtaattccctaaggaagccaggcggttctgtgcttagagcacagactcagaaagaggcaaatatactcaatgtacatcatatctcttggttaccttgagcaagtactgtggcttcttttagccttgatttcttcatctgtagaatgggcacagtggtatccacctaacaggattattgtgacaattgcaggtaatgtaatttaaagcactactggcccaggggctacaccaatgctcagcaaaatggtggttttctttcctccctctgatagtgacagaagataagataggattttcttctaaaggaaaagtcaatcgaaaattcttttgtcctgaaagtagttaaagaacattccagagagattctacaatatgtttgcaagctacccaccaggcacatgaaccagagcccagtgaaagccatagaggaaattagagaagggagaaagtttctcactgggtgtcagtggtctggactggcttccaggaagagggtaggcagggacctaaggaaggacaaaagccttcttttcactcttagcggagctgtcccaagagcaatggaaatgaagtgagaggacagtacagacctgttccaccagtatgcaaatcatgtaatgaaacacaaatgacttagcaagaacgaatgtgactcacacactcatctgactctgctggttcagaccagaggaacagcctcaagttcagtcggacctttctaaggaggttttgttggaattccacaagaccctagttctgaaggtaggacaaagaaggagaagagaactgcactgacagagtgagttctacatgccagggccttacatacatcattttggggtatgggaaacagacatacatctttctttttctcatatccacaatcagcaatttttttttttttttttagcaacggaaagcgaaatcttaatacaagaaaaggcctttaagattatatacaagctgtacgtagcagagaaaaggttccaatctagttgctgtggctgcaaatcactttctgcggtgtcattgtggggcttgggaagtagtttcagagggctgattctctagcccagaggccttcatgcagatgaggaagtgaatgcagataagccagaatgtcagcagtagactagaagaggtcaagatgattagactttcagsttttgtccagctctacttaccctttcagggcacctaggactttactaaagcccctctgggtattctgatctgggaaagtgtgttttggtctagaatagggggatgacatcatctatcagcagggtttgacttcctttcttgaataagttgtacctgtcttctgtggagtgggaataaatggagcctccagagttacttgtccccaggctccagaatgtactcactgatcctagtgaggcccaaacctgtggcctggagtggcttgtgtgaactgggttctacactggcaaaatccaatccatttgacagcagtgaaattggagtgggatggagaaggtcatcgtatcctttcatcaatcccaaagcctgttgctaccggcttttttctcatatcagatgtagccactggatggaaagtcattgtgcaatctcattctcgactcttctttaagtttcaccaaaacttacttgttttggtgaaattgccacagtcattgagtaaatgtcattcaccagggcagaaaggtaacctggatttctgaaaagtatcctgagtgcccgtcctgtgccggacaggttcctttccatgtcatctcctttgatcctggcaacccagagaaggagatagtactgttctacctattttacagagaaggagactgaggcttatagaagtaaactgaccacccacttagtaagtgacagagccaggactggaatcagggctattgtaccccaaaatgcactttactattgcactgctttccccaaaatcccctgctgcagacaccaggatcagtgctgaccttgaggcattcctccataaatgtgttagttaactgatggatatcagggaacaagctctcatctgcttactgtgatgtctgactgactgcttcccaaaggcgttcttttcccttggctccctactcctttctcattcataagcactcccttcctttctggagctattctgatgactggtctcttcctctcttctcaaattcttatggtgtatttatttttttcttgtattaagctccaaccttaagtatctgaatcaggggaaggggagatgtgggctttgtccggttgggaaacacgcccttcctctgccccacccttgatttccaaggcttgtgatctaagcctgcatgcaggggcagggggaatggttgaaggactcgtaacaagcattttccgaggacctacagatttttcagcaagggaatttagaaaatcttgccactccaaattaagaaatgtgattaaagaataaaatcacctatttgttgagtagtatttcatgctatcctcttgatctacattatcaaccaacctggaccacagcctctaagagagtggttgctacacttattttatatgtgagaaaatggaggctcagggaggttttcctgattaaaatctgtgctctgtctgttatgcaccccacccttgtccactgccaagaatagctgagggaaggccaaacatactgagtacactgcaagtggatgattccttgttcttgaatttgccattgtcctgaagacttgtgttgagttggagctagactaacaccgtcttcatccccatttccaaaaggaggcatattttcatccactggtaggtcattaagggagtagtctttggcctatatagctccaattcactgactttggtattgcctatagtgacccagtcttgcctagagctcttgaaaagcactgagagtgtggtactcagtgctttgcatgaaatcatttaatttttcaccattgcttacagtaatattttccaattgtgattcaaataggtagatgttctctgaaaatagtgattaaaggtcaaataagtattctttccttcaggacttctcagaggctttagtaatcttataagcatgataattgacaaaaataaggatttagtatagaacattcacctatcttttttgaagaaacccttaatattcagtggaatatggtttgggaaagactggcctccaaaataaggtctgggttgcttagtttgacactgaaagcccttcgtgaactaggccctccttgtctctgcagccctatttctcaccactgctcacccaccttccccaacaccctcttctccagctatactgaactatttgaagttttggggaacttctgtggaaggcctctgagccacccctctgcctggaatatatatcccccactcctgcccccttaaacccagcaaatactcattcacctttaggattctggtcaagtatcccttccaaatagtaattgaccccagcctctaacttctttcatagctcctataaaacacattagtatacttatttattttcttgtatccctcaactgtctgctctatatgtcaggatttataaatcctcatttttctttgtctttagcacttttcatagtgcctagcttttttctttttttttaaatttaatttaacgtatttatttatttatttattttgcctagtaccacagatttggtcttttagattatctttagaataattttttccccacatctttttcggatgtccatggcaatctaatagtatttacatatcaacttctgaatttaaaagtttagtgttctaagtaaaattctccctctctgtctcttcaaattgtcctttacctcctttattccataaaggctctatgctatcttcttttacatttttaactggttattatttatatatgagaaaaccattgtttttatcccttgtttagcaggcaacggcctcagtgtgatcttttttgtcagtattcttattttttcctcttaagtttttccaataatacatttttataatttcaaaatgattatamagtagtctgctgtcttccatgtctgcttatttgaaatagtgttccacgtagttgaggattcagtcctagacacttatggctaagaatgattctgggatcttccactcttctgtctcatcaagactggccactggcttgctcttttcttgccaccgaaggaaggtgtccatctgtcccaggaaggacaaactcatgtcttcagcactgccacaggtctatctttaggccatcagccacctcccctccgctctcttcccttctcytgcctctccaagtgctttgatttgtagtcggaagttcctcttgtccacttgcctcttccccctcatttcccaagttcccacaggaacctgggaataggttgtgcccagaggttagaacggaaactgcagcaagataactctgaggggacaatgcccmgttgacgtcatttcaactactttgcttcagctagaggtggttttttttttaatcttccatttttcttcaggttactcttctactccaccctgtctagtgtctgtcaacttctatttgaaaattccctggcattgtctcgttggtttattgtttccttatattctcattcaatatccatagttccaagtggtgacttagaaatgtgtccttgatagagttgctttcttctgaagcagaagcatctcattggggatataataacttcctcttatcattgcatatttaatttccgtgctgacaccaggtagtgtagggattatatagccgtaatccccagggaaatacacaaatgtgttaagtaagttgtcatcaattgtaaaaaaagaaacctttacaagccctggttactgctctttaattattagtttcagtcaagaggaagataaaaggaaactatcatttattacgttcctactatgtggcagtgtgctaaggccatttacatatattatattgctcagctttccctggtttatctccctagataaactctatttttcctattttttagtgtgagaactaagactcagcatttatttatttatttacttacttacttacttatttatttttttgaggcagagtctcactctgttgcccagaccgaactgcagtggtgcgatctcggctcactgcgacctccgcctcctgggttcaagtgattttcctgcctcagcctcctgagtagctgggactataggcacatgccatcacacccagataatttttgtatttttattacagatgaggtttcactatgttggccagactggtctcaaacacctgacctcaggtgatctgcccacctcagccacacgaagtgctgggattacagacgtgagccaccgtgcctagccaggctcagcatttaaataactggcttgaggtcatgttcaaattgctgtatctacaacatgccacccaaggtccagatgatccctgttcgtagaaatgtagtgtgtgtcacctggggttatagtgcatgtgagtggggagtcacttaatgtctgttcctttttgtctcctttctccagctatayctgcaggcccgcttcacttggcgaggagcccgcctgctccggcccctcctgcagttcaccttgatcatgatggccttctacacgggactgtctcgcgtatcagaccacaagcaccatcccagtgatgttctggcaggatttgctcaaggagccctggtggcctgctgcatagtaagtagcatcttgtcctcaatatgcaagtggagccctggactgttgcttgttaaatgtttccagctcagtgactaaagctagagagccctcgttcctgtcctctgcttggtgtctgaagagtcacctggccttaggccttaggccttaggactccttcagtaaaatgagaataattcctgcttcttcccagcctgtgagttttgatctgatagggtctgtaaatctctgtaaatacagaggttttgggctcgtagaatgttgcaattggaagagagctgagatattgtccaacttgctcatgttatagatgaggaaatttagggaagaaacttacccaaggtcatgtgtcagcaggtcatgcttagtgtcatgctaagtctgttgacctagtagcaagatctaagtctcctgactcgagtgctcacatgctgttttggtggacacagtacgcaatgggacttctccgcttcttggaaaatgcctcctcttccctctgtgaccttgggagtgactcacacagaccctaaactcagtgttcattggagaagaggaggttatctgaaggctgagccctctctcagcctgaggccctcgtacatcgagtcacagacttcctagggataacttgggatggaccacatactgatttgccccaaatgaatgggttaccttttcacatacttcatctctgactccaggtgaaggtgggagaaggcattgcacttctctgagcctccatctgtaggcactgcttttcctgcctgctaagagttttgaggggcttattcagcgaacatgactgagcacctactttgatattgtgacttcctgggccctactgaggggagctcaccccagcccagcaggaatcccagagtacaataatggctggatatttaagcaccacacatgtaggttgtattgttgttagtattatccttgctcattcacagtaagaattatgaacaatagagagatctaaaccagcttcttatcctttcctggtttctgagcctggttgcaggcttatgtctcactatgcagcctctccccagctcctctgtaacagcacttaacactctggattgaaattgtcgatgggtgtcttcttttaggctgtaagttcttgggggcagggaccatgtgtaatatatatgttactctccctatcttatcaaggcctctcagggattctagctcagactaagcaaatgtgtgcctaacaagcaaaaagccagaatcaatgagttgatctaacctttcttgagaacactgtaggaagttatttcttgaaggtataggaatgaataaggctcagccctcccaaggaaattccatccttgctcctctcacagccaggccaagcacaggagcttaatgctgtgggggctgtcatagtgacatgtgtagggggcttcagcaggcagggaagcacctgactccatgtgcaggggtcaagaagagggagaaggagttgcagcaatcagagtgggcaccacgaagaaagcagtgtgtgaactgcctgcagcctttgacatgggaatcccagcctactggactggctgttttaatggctttctcccttgctttctttttcttttttctttttaaaagtaaaggccagaagggagagaacctgggggagcaaaccgttaatgagagcagctgtcactgaccggcttgttctctggtgcctggccctttaatgtgaggtgacagtgggggatgggtgtttgcactgaagggtaaccctttgctgactgtgcccttctgagctttgctctcagcaggaggacagcccgygggggcctgctgttgtggttccttcttggcgccactgccctaattggagtcccctgcacccccagttaaaaaaattaaaaggttgggggatccttactagccttcctctcttttatatcctaaaacatgggccataagcaattagacagagcgttcgggaggactatggcttatttccaagaagtgaaatgaaggttctgacttgtgtcctgtttggctctcgctgactgtagcacagtataggaatttgatcctagcgtttacaaagcacctactctctgctggtaccattctgatactttacccattgtcttcctttttttttttttttttttttgagagtctcgctctctcacccaggctagagtgcaatggcacgatctcggctcactgcaacctctgcctctcaggttgaagattcttccccctcagcctcccaagtagctgggattacaggcacccaccgtcatgcctggctaatttttgtatttctgtagagatggggtttcactgtgttggccaggctggtcttgaactcctgacctcaggtgatccgcccgcctcagcctccaaaagtgctgggtttacaggtgtgagccactgtgcccagctgcccactgtcttcttttagtcacattaagccattgtactacagccattttacagaagtaactagctcagagaggtaacttaagtcatccagggtcagagagctaatagacagctgcaccacgattctcatggactcaaagctatgccctctgcactctgcaaggagaaggggtccctgaagctgaaggccctgcagttaacccgaaacagaagctccatagttagctgcttaaagagtatcatttaattgtgtcacggagtccttcctaaccctttgggtggatccagttattgctttgagtttgaaagcctgatttacaatgtaaagatggtttggaaaggggtgataaatctctttccctgccttttactcactcacctgtgaacatgcaagaacagggactcaatcttacytatcatttttctccaaatgcctgacacccagccttgtgctcagtgggacctcatggtccagaatggcttggaatcgcagcactgagagattcatttcattgaagccatctgagaggccaggacagggaagtgcctggaagctgtggctactgagaataaaagtttggaaatgttcagctgggaggaaagaaggtagtgtcttttccagccgtaagctcccaggattctgttgtcctgggtttgattgtgagggagacagaagcaaagctcaggaccctggattgaggagagatgggtagatctgtgaggaggtgtggggaaccagagaccatgtgatgaaggcaccaggtgcctgggagagggaactatgagtaggatgacaggcatctgcctcatgggttttgcagctttatcagggttgtgcaatgtagctgtcacgtgccaagcaggagtctgtgacctctgctctgcttgtgccacatgacagaactcttccccacgaatcagggccgctgtcccagggaatgccaggaaggascaaagttctcttcttactcacaactatggctgtattgaatggtttttgaaacacagagacatcacctgaggttaagaggattgataaaaaagcagcatgtatggcacaaaggccaccacttgaggtgccaagaaacacagaatccattttccagtctgccagataacctcctgagccaagcctttayggactccctgttaattgagttgtaatcttcgctgacatttgctgagagcccaagcactcagagagaaggtagcaaagctggagttgaccccagacagcctgacacagagctggcactccaagacccaggctttggcaggtctcctctcatctctccaccccttcacctcccrgcatgtcaaacatttcaatattttccaacacctgagtttctgtattagatacctgtcccctttgatggaacacagttccagtgtcacctcatctctgatgaaaccttctgtattagctgcctctggctgctgtaacaaattaccacaaatttagtggcttaaaagaatgcaagtttcttttcttacagttctggaagttgggagttggaaaagggtctcactgagctaaaatcaaggtggaacacattccatctagaggatctaaggggagatctgttttcttgctttttctagctttctggagctacctgagttccttgactcatggccccattctccactttcaaagctagcagcatagaatcttcacttctccctctctctctcacacacacatatactttctctggcctttgcatccattgtcacaccttcttctgtgacttttgtccttttgcctccctcttttacagatgctgggaccaccttgataacccaggatgatctctccatctcaagatcttaacttaatctcattttatcatgtagcatcattcattgcttctgggacttaggatgcgggcatctttgggggacattgttcagctttccacaacttccccagtccctggagacagtattgtctcacttccttccagtcccccatggccttttgcactttcttcctaccatggctttaggcctcatctactcatggcctgctcatatgtctgtctcttcagctagattgtgggtgccttaatagcagaatccatggcttaaccttctgattatttattctcggtatgtagtacagcagctgacacaataggtgcttcatcagcattgggtaaatggtgaatgatgaattagcttgtggcttcaggccagacacttcccttctgggcctagtttcctcacctgtgaattgaagctggaggccttgtagctccatgacctttgtgcacagacattctatggcacagctgactttgtagtaactgactgaggtacagtgcattaaccctagaatgctggttccataactgcagagccttaggcaacaggcatgacagccgagaacttttacctgggtctgttgagggtagatcctgtcacaacaggcagacttgtctagacaaaaatcacatgtcaaatggaagtctggtttcctcctccattgcttactaattgaatgctttccagaaaaggaagacaatggaagccagcacagacagaaaacctatacagtgtcatgaactcaacacaaagacacaagcacttagggtcggataggcctgcctgcacaccttcagagatctggacagaggtacacaggacaaaggagaaggccacagcccagatagaccatgaggtgcatgggcagacccaatcgtactcagaaccacagacacacataaacagacagacgaataaaaaaaaaacacaggctcatattggctctcccagccccctcccgcctacacactcactaagttacccctaccaaagatgtgagctttacagttggactcacacagggactaggacgaaggaacagacatcggttcatttcctgtctggtgacaacttgcatatctggtcacctcctccctgaccctctaacagatggcaaattaggggcccctgggaggggtcaggggagggcccggctgccattgctgtgggttcagcagaggaagcagctgctcatggatttcgtaaatacacagcagagtctttcctggttttcctcttcccgggggtgtggctccgcttgccgttgctcttttgtgtgctgctatcttcctccagatgtagggaagggcgagggcgttctttgtctctgccccagtgaggtgaccttgggaaaagacaccagcaagaatgccagtgtgaagaagagttcagcgatgacaacccctgcaaaaggaaactgcagtgcagggagaggccaggacacgcccaaggacacatagtagcagagtaggaaccaaatccccagtttcttgattccatctaaagggctaaacagtaaattccaagcatgcttagccatggatttgcaaggcctcttccttctctaacaggagagagtcccatctattcccttctgatttactccagggctgcctgggcacaggggaatggatgaaatgagctcccaaacctcttctggccctgcagaagtctarctctttgcccagtaatgtgaccttgaggtaatctgatcttgccactgctggcccccactcttaggcaggcagaaacatggatgtgggagagagaaggaagcaaagaaataaactttggccgccaatagataacgacactatctttgtagtactctacaactgttcaaaatacagttgaccttgaacaacatggggactagaggttccgacctccagcacaataaaaagtccaaatagaacttttgactccctcaaaacttaaaactactaacagcctaatgttgattggaagccttactgataacataaacagtcaattaacatatgttttgtatgttttatgtattatatacagtattcttacaataaagtaagctagagaaaagaaaatattatcaagaaaattataaggaagaggaaatatatttactatacattaggtggaagtgatcaccataaaagtcttcatgctggttgtttccatgttgagtaggctcacgaggaggaagaagaggaggggttggtcttgctgtctcagggttggcagaagcagaagaaaatttgtgtttaagtggacccatgcagttcaagctcatgttattcaaggatcaactgtacttataaaacttcctttcttgttcccctgctaagatggatgagctgacgaagcagaggttcagagaggaagttatattcctgccacttgctaggtaggctgtcagggcaagtcacttcacctctcagccaccttttccaatcccatgaggttgggatgataatgcctaacatgatttttggattgaggattcagagaattaaagatacatcatgcttggcacatgcaacatattgattgtgaattgtgcgttaagtactatgctttgtttaaagattcagagctaaaaggagttggtccttaaagagcttatctagtgcagtagctttccaagacttgaccgccatctataataagaaatacactttatatcataacccaatagaggcacccacacgtaactaaaacaaatatttcacaaaataagacttgcccttactgtgtgagaaattctgatattttctattaaccttcaaaaatgctggtggtaaccacctagttagttgattttgtagcttgctaatggcttgagaatgatctagtaggaatagacatgtaaacagacaagtatgatagaagggcacggctgctgggatgggatacactactgaggacagtggggttacaagagaaggggtgattaattcttcttgagggtgttggaagactagaaagaatttttagagtaggtaattatttaaaaatgaatggtcatttgctgtaagatacaaaagataaggaagggaattccacgcagaaggaataccatgaagacatggcgatgggtgagaacatgatatgttttgtgaccctagaaatgcagaacaacraaacttgggggataatggggagaggtgacctcaatgaatagtagcctcattctccctttcagcttcaaaattggatggtttctgggaatggggtcccctgcctttgttgagccttggtcatctttgggtactatgttcctaagctccagctcctactgcatttagcaccccatagacagagctgtcagtcccctgggtactccttaccagacaccctccctaatagcctatgaatattttcctggaaggttccttggcatagattcctgttctccatcagtattgcccacaactttctttaaagggcgggggcgggtcttcctatgttgcccaggctggccttaaactcttgggctcaagccgtcctcccacttcaacttcctgactagctgggaccacaggcacacagcagcatgctccgcaaaattgctctcaactttctttcctcctctaaaccctctttgttcattttgtgggactacttttcttcacattcctcaatagcagtgatgatgtgaatagtccttcataaggctgggtgcgtagtggcttacacctgtaatcccagcgctttaggaggccaaggtgggtggatcacttgacttcagaagttcaagaccaggccagccaacatcccgtctctactaaaaaaatacaaaaattggccaggtgcagtggtgcacacctgtaatcccagctactcggaggctgaggcacaagaatacttggactggggaggtggaggctgcagtgagtggagatcgtgcactgcactccagcctgagcgacagagcaagactctgtctcaaaataaataactgaatgaatgaatgagtagttcttcatagctacaaagtgttttcacatatattccatgtaagccttacaggaaccacaggtaggtggattttttttggttttttttggagatggagtttcactcttgttgcaggctggagtgcaatcacagctcaccacaacctccatctcccaggttcaagtgattctcctgcctcagtctcccaagtagctgggattacaggcgtgtgcaatcatgcccagctaatttttgtatttttagtagagacagggtttctccatgttggtcaggctggtctcgaactccccacctgaagtgatccgcccacctcggcctcccaaagtgctgggattacagctgtgagccaccgcggccagccggtggattttaaaaataacatttccacacaaatacagggcagacccatcatctgcaactataaaaccttttaatcttgtataaattcaagacaagtgtaacagcttggatcacacaccagtagaaattttgggactatattctgctgtctgatttccagtgtcacactcttttccacctcatcattttccctctcagttatactaggaagtcactcaacagaaatgctcacaaattcccagtgccaaaagccgctgaaagccctttattgaggtcaaaaaataatgattgcagttggataatcccatctagttaaaaaaaaaayggctgccaaagatggcttttctttagatagcacttactgtacttagggcatgagggtgagccaggtcccaaggctttctcctccaaagagggttattccttccttaatccatgagattgttcagtatggtagaccagaaagctaaaaggaaatcccagggccaaatcacatgggaatgcatgcaaaaggagcaacagccatggtctttacgctcacatggtggagctctattaagagctacagtttttgaactctgaaaacagggatgactcaacacratccatgcccttgagtagctagctcagtctagaaggggaaatatgacacagcatttaaagcgtcacgtatcaaagcctacggcctaacactaagatggaaggttattaaagttcaatatgggtaccaaagagagaagagaagggtggttcaagaaaggtaatgttgtgcccagtgtagattgtctaagacacacagccatgcaatggcagatctaggatttgagcccatctgttcatctccacagattgtccactaatggctcttttaactgtactctggataacaaataactgtagtgtttgctaaaatgcagattccagattctcagtaggtcttagatgggcccaggaatctgctatttcaggaagctcccaggtgattctgaaacagatggtttgaggacaacactttaagaaataccagaatagatgatgctcaattttcttgaggttctaagattctaaaattcttctgcttttatagttatctaccctttgctagcattttagctcaatgtgttacgtaaggatgggattcctattttcaaggagttcacttacactcagggaccctaggaacatttaaaggataattttattgtcataatctgcccttaacaaaattaacaaaatgaccctcaaaatttgctgattcagccattcctagcaatgaaaggaggaacctggctacctaccagacttcttatttctggtgtacttggttcttggtgacctctaggcaggcagcaccccagcagggctggactgtgtgtgctccctggaaggctgacatttccggagtgtgaatgctggcagtaagacatcggaagcatcttcctctttgagtgtgccaactcttggccaaagatagctctagaaattgtaagaactttgagagcagattctgtttgtcctatagaaaactcccatcagcatattgcctctacatccagctagaatgtgtcagatttcacatgttcattcatagtctcaaccactcttttttcccccctctctttttatctttttccagttttttgtttgttttatctcttcatcacggtgaatggggttcttacagcttagagttgtcttgtttgtgtgtactcatgctcttgaaggaaggggctacattgtccacagtgcttgggtaaattagatcatattccaccctgggatcacagaacagtttactccttttgactcaggaggaggtcagaatcacttccccacagataaatccatagaaacagaaagtagattgatggttaccaggggctggggagagaagggaatgggacatgactgcttaaagtttatggagttttattttggggtaatgaaatgtcttggaattagataaaagtgatggtggtacaacactatacagtactacatgccactggcgtggggggcaatcactcccccaagacaatgtcacaggcataggaaagcagagttatatatatttctttcctagcatagttatcaaaattttaagagtttttatgggaataagtgcaaagatttctagagttgaaaacagaactagaaagaaaaacattgcctccctcgcacacatacccaccccaaacatataacctctatcagctgcagtcctgtcctcaacatttcaaaatccatctcttcttctttgtctttactgtataggtgttgttcaggactcatcctcccctagactctgtaatccctgcctccaggctcactgcatgctttttgactccgtctccattttagttaccaacatgatttttttttttttttttttttgtctgagacagagtctcgctgtctcgcccaggctggagtgcaatggcaccatcttggctcactgaaacctccgcctcccaggtccaagtgattcttccacctcagcctcccgagtagctgggattataggcacccaccatcatgcccacctaatttttgtacttttgtagagagggggtttcaccatgttggccaggctggtctctaactcctgacctcagatgatccacctgcctcagcctcccaaagtgctgggattttaggcgtgagccactgcacctgacctccaacatgatcttaatgcaggtctttccaacatgttgcttccctgctttcaccttgacaatgattcctagggccaaaagaatgagatctgaacttttaacatgtcccaagacgcttttcaatatctagtcctctcctctccagcctctttgactgctccgccttagatatactgagcttcctgcagctcctggatgtgctgtactccctttctcctgtacctttgcacacactattccctttgcctataacatcctagcattcactgcctggttaactcctccttatccttcaaagctaagatcaaatagacaacctttaggagaagccttctaaggcctgcttcccactccccttcagtctgggttaaatgccacattctctgtgcttcctcaacacccttgcttccctccatcataatccttaatatgctgtattgtggtcatctgtttacctggctgtctaactcattggcctataaactccttgagggtaaaagactgtcttatatatattcatcttcatatttttggagtttaacacatagcaggaatccaataagtatttattgattgcattcattcattttccaaaaaaagagtaatttataaaattcaaagaattggagaaacggaattgaaaacaaatgttctgcgcatcgtaacttagatctcttctctgtgcttagggtatagtttttcttgtttgttggaactgtatttattgtccagtgtgtcctttcacacagcagagatctgtggagtaggattgtgggctggcagtgggtttatcccacagacctaagacagctacttaatttgtatagacccttcccagcctgggcctctgggttttccttctgggtggagatcatcttctgtaggaaatggaactgcttcaagccaagaagcttttacttttactaggtctttttgtgtcctgctgttcaaatattaggaagactgaaccctgtttcggtcttgacagtattacgtttcgtgatcccaaaaaaaagtgtttgtgtaacctcaagtcatgctgaaagtgaaatacagcttaaagtgggattctgctggacctgactcaacttttcacctcaccgcttggctccgtgcaggcagtatttgagtatgtggttccccctcaagtctgtaggagttgtattgtcaataaagtccaaggccagagtgcttgctttctagtaagtagagagaatttttgaaattcaacgacaaacatttattaagcccttattgtgtacagggctcaaagctaagtgctttgggtgattcagggtgattagggataggattccatcttcaagaagcctcccatctaggaagaaaggtcgataagcatagttttggacacacgggagagcatggctttctctgggcccagtaattactttggtatccagatcattagagaacggaatgccttctattgaactatgtaacagtcacaggtttagatcttctcaagttattattgcctttaatcttcatatgattcctatcctgcagttaggaaatggaaaccctaggatatagtgactgtgagctcagaaaattaggttgggagataagccagtagattgaggtggtagattcttcaagatcttgaaggggggaaggtgggggggggggacgggggagctgttcccagctatatttgcccttggcagatgggatggattctgggagaaagctctaagaaattaggcctgtacgacttattttcatgaatctagctgctaagctggaataagtgaagttaaaagtagtgatgggccaggcacggtggctcacacctgtaatcccagttctttggaaggctgaggcaggcggatcatgaggtcaggagttccagaccagcctggtcagcatggtgaaaccccgtctctactaaaaatataaaaattagccaggcatagtggcacgtgcctgtaatcccagctactcaggaggctgaggcaggagaatcccttgaacctgggtggcaggggttgcagtgagctgagatcgtgccactgcactccagcctgggtgacagaatgagactccgtcttaaaaaaaaaaaaagaaagtagtgatggggagggattgatcaaaacctcttcctctgagacaaagtgaaggataaaggggaggataattttgagctacagatgaggacattgttgtctgcacctctcagatgataacatcattttagtacaaaaagaagtaaggccactgggggagataagggaaaatgtggagctggggctggggctgggcctggggcggagaagagttgaaaagtttaattatcttctcattgaactttaatcgagtctgtttccttatactggggacacttgaaaacagtttcccaaaccaactacaaagaattttctggcaggggagcctagagcctactggcaggttgtgcacagatcttttctttcctgatcctcaagtttgactctgactaggagacaaatcttttggtaccatggttttcactgttcaaacctcctgacaaaagaaagggagaaaagacttaactttttcctttgcaaagtggtacatcaatagcactcaaactgtgaatgtattaagatgttacacttctcggctaatatttcattttcttgtagtagcatagaaatagcctagctttttttttttaacaacaaaataatacttattatatgttttggtaggtaatatatgcaatgggtacaaaattcaaaaggtacaacaggttttacagtgaccagtaaatgtctgtttcacctttgccttctagccacccagttcccttctcttgaggtaacgagcatcaccaatttcttgctgtgatttttatagcactttcttgattgccgtgttgctacagaagggacactgtgaaaatgagtttaacaaataattcaagtccctactgtggccaggccctggatcgccagagccttagttttggtaaaatcttattaagaacttcattttcttgcctataatgtggccagagtgaaaccacagtgctgtcattagtagtgagcacattaccatctgcaggacaaagactcatcaattcagaaggctgttgggtgtagaaactttgatagtgttttagtcgctattttgaaatccagccaagtgtttcctattaaattacatgactgatagctgccgcttatggttacttagtaaaaactcctgttgctaaatggctcaaatggatgtctgtgtgtttattttgccatctaatacaaagcataaatttytcttactccagtagctcatcaaacccttgaatctttcatcataagcacattgaggcaggaactatgcctgtgccatcctcacacctttgcaagtrgcactcaataaatgtttctcaagtattgttcagactcagtgaggtcacatccccaggaggaaaaaggacgctgggaatgagtgatacgagatttgtcattaaccgttcctccacgtttagttgccaactttctcagcaacgagaacctggtttcttgacccccgtcaaatggttgatatcactaagttttcaggaaaaagtagttaccactgcctgacttcagctcttgctgataggagttcatgttggctgatctttttcggttacaccctggattcctttgtgaggaaagggaaagtagtgtgaattaatgactatcactaattatgacctgcttcctttgttgaggaacttatctttcattgctattcgtttgccttgagaaataaggaagtatgggttgcagatatgggcaatggactgagagtccttagaagtggattctactgaaccagtgttgtgcaacctgggacatgtcactgccttttcccgggtctcagtttccctatctgtacaataaaccttgatgatatgatctctgttgtccttccctattcaaagagttatgatttggggccccttttcctgaagtctgcgctcctctgaccttccttttccctctgtacccagacccccgatgtcagttactgacttcgatctctgatttgtgcttctaggttttcttcgtgtctgacctcttcaagactaagacgacgctctccctgcctgcccctgctatccggaaggaaatcctttcacctgtggacattattgacaggaacaatcaccacaacatgatgtaggtgcyacccacctcctgagctgtttttgtaaaatgactgctgacagcaagttcttgctgctctccaatctcatcagacagtagaatgtagggaaaaacttttgcccgactgatttttaaaaargaaaaaaaaaatgttttactatgtggccttccaaaataggtagtgtttgcctatgtggaaacaacagcaaactaacaccaagtgccagagtcctggatgtgcaattggtttaagtgttcatgttctagtgaacacagcttgttcaggaacaaacactaaaacgatttgagtagaggctgctggtcaccttttgtgacctgaggaatcccaggcctgtgagaaaagcaaaaattcacattgcagcacatgatgccagaaatagcactgaatcaagaaaatagccattgcggagctgccctcttgagtctttctgtccatcccattctattctgtactgtgacttyagttcaggaagttttgttttgtgttttaaataaaaggaaagagcaagtttgctcagtcaagtgatcagatcccgaatctagattcccagttctaaggccttatcacctcccctgcccataggccaacaaccatagttcctcacattagtgattagcagactctttgtggacgagtgaatttcacaaacagcacaatttcagaagaaatcgagggcacaggccctcacttttcttcttttgacgcatcatcctgtgatgttgaaatgtcarttgcaggatgctgatgttgtgcacgtcaatcaccgggcacttgcatactcttagaaacagttcgacttcggttactgccttctcccttgaaatccttgctgcgtgcccaccaggatttcctgtgagggcccgggaatgagcaaggcatggtctgccaccagctgacggaaagcagccttctgtacaacagatgggagggtgaagggggcagaatgaaaatcgaaccaaccttttagctgttgcaaatcagaaggagccagagaagcaggcagtctcatgcatgagaggttacccttcaggatgacagagctgagggtctttgtaggagttgctcttgctgtgtaaagcactattgtcttggggttgagccctagggcagttcttggtaggttctgctgggcagaacatatgggttaaatctcggtagagagttttcctcatcctctatccgtaagtgtccttccatgcaaggtcccactctaggtgatagacagggaccccttctactgaacctttgaggaaaggaggaaggaagaaatgcgtttagatcttggatgcagacctttcaaagggttaaatgtaaccatatggatcaaccacatgcacatccttactacagaatccgtcctttcatttcaacttatagcaagctatgatttttatatataaatattatataaataatgtataaaacattaaaagttaactatgtaagatattatttctgaaacaatttagctatatccactatgattataaactgtgtctcgacctgtgttatttacattagctgcttaaaaaagcattgagttaattttttwaaatatcaactaaaatatcatagttctgtggtagacattgttttataatgaaataactgcaactagagaaaactgtataaaaacattaaattgtcagtatttttgtaaggttccattttgtaaagagaataatattcaaagacttttgtagcatacaaagtgaaaacttgtatctgcgaaactatacttgtattaaatgtgctttttaaataaaagctcgtaacacaactaattaaggacttgcaagcctggagtgtttgagagatgtttgtctcaggtgtgtgggtaggagaaggaagcatcgcgggctggcctctttgagtgggcttgcctcatctcagcgcaccaactcctgatttttttcagtgggaaatgtggtggtcatagggtagataccgatgtctgccctgctctttcatctctgaaagcctgtttgcagaatgaggccctggctctaccctcatctcaggctcttctaaagagcttttgtattctaaagaggatttttccatcagagaggtaggagctgtaggaaccccgarggcagataagcagccctcactctagataaggtatgctgggggagcttactgagggaatcctgtacacagcccacatcaaaggaaggctgagaatggcctgtggctcctgcttcccttccttgtgtttctccaacctggaagaaaaggggaagctagaaattcacatttattgagcacctgtgtgccagggatttctgcctatttgttctgtctgatcttcacagcagttattttgagaaagaaagaatactaaagaatgcaaagatgaaatgattagtctaagatcctagagcattaaattgtaggataggtcttatattaatttgctatagcggctataacaaattaccacaaacgtaaaacagcatagatgtattgtcttacaatcttggaggctctaggcaagaagctgtttccttgccttttctgtttttagaggccacccactttccctggcttgtggccctcttcatgttcacatggaggaagcaacattgggtagagtcctcaccctgccatctctttggttctcctcttctgccacccctttcacatgtaaaggccctccttgctgattacacagacctgctcataatctaggataatcacctatattaaagtcagttcactggcaaacttaattcaatctgctgccttaattcctctttgccatggaacatatattcacagatgccagggatctaagacatggccatatttcgggaaccattattcagagtaccagagttcaccctctggccctcaaaagattcacatccatcccaaatgcaaaacagatcaccctatccccacatcccctaaagacctaggatatggcagtatcaagtcaaaatcctaaatcttaacaacttaaacaccccaaatctcatcatctaaactaacccattcaaattaggtaaaaaggaggctccatgtttaatccaccctggaatacattgctctctatgaacctgtgaaaattaagaaacaagttatctgctccctaaattcactggtgaaacaggcatagaataacagttatagacattcctatttaaaaagggagagaagccaggcgtgatgtttcactcctgtaatcccagcactttgggaggccgaggcaggcggaccacgagttcaggagattgagatcatcctggctaacatggtgaaaccccatctctactaaaaatacaaaaaaattagccgggcgtggtggtgggcgcctatagtcccagctacttgggaggctgaggcaggagaatggcgtgaacccgggagggggagcttgcagttagccgagatcccgccactgcactccagcctgggcgacagagtgagactgtctcaaaaaaaaaaaaaaaggagagagagagagaaatagacggaaaaaagaagtcatcagtccccagcaacttcaaaatccagcagggaccaggcatgatggctcactcatgcctgtaatcccagcactttgggaggccgaggcaggcagatcacttgaggtcaggagttcaagaccagcctggccaacgtggtgaaatctcatctactaaaaatacaaaagattagctgggtgtggtggcacactcctgtaatcccagctactctggaggctgaggcaggagaatcacttgaacccaggaggcagaggttgcactgagccgagattgcaccactgcactccagcctgggcagtggagtgagactctgtctaaaaaaaaaaaaaggaaagaaaaatccagccagggatgctccatttggcttcaaggcctggaaatagacccaagtggctcatgtctggtttcttgccaccaaggtcagcctgctctttgctgctggacaatgcagtcccctccagcccctggaatagctcagcaatttcacagcatttttatataagtggtgatgtccgtttgagccccaaaatgtagctagtaagatccttaaggccagaggccaaattttcacttcaaatctgaagaaccagtgtccagaggggcagaacaactcttgttggtgggggtaggagagggaaggcacccagggagtggagggactggtgagaccagagcccaagcctcctgatccgagtaccccagtctttccattttatcttccaacagtacttgacaaaccaaacttgagaagtagccccgtttcatgcggacttaaggaaacaatggagctgcgtggtattgtgaggagcagcatgatgtggagaaggaaacaaggacctggggactcagacccaggttgcagtcttggctctgacacttcctggctatgtgatgtgactttggacacgtttcttaacctctctgagccttgggttattgctcgttaaagatgagatttacaagatctgtttttatacctctttgctcatggcagtctgtgagccttgacttgcttctttaaatggggttcacggactaacaacatttgtatccctggggagcttggtagaaatatagacctaggagaacccctgccccaccccaacctacagaatcagaatcttcctttgggtaggatccccaggtgatctacatgcacaataaggtttgagaaatacccccactctttgctcattaaacctgcagactctgttcaggtgtgcttcccccaagccacactcctccggggcttggctsggagcatgctgggtgcagacatcggtaacctcttagcttaatgtaccaaaattgcatgcataaagatctgtatcaagactgtcagattctcaggggcagaagcaagtcttatcctctgcaaatcctgcatgtctgcctggcactgaatagttcccggcaattttgaaccaattaatcatcacccgggtcaaaaagtcacatgattcttggtaaccatccaattaaacaggctgcagggacatagagaattgcaaaacattgaccctgtccttaggaattaatgaggacttaaatttcctctgaggtagagatggaaaaaaacaaaaactttaacagctagaaatctgcataagattcctgccagttagaataaattcgtacattcattcgttgattccaaagtatttccaaagaactgtttatgtgcaaaatcctgacgcaggtactttcatgcagtctgcttcatttaaatcttcaaaaaccactgttaaagtagataggattggggggaaatgaagagaagttggttgataggtaaaaaaatacaattgatagaaggagtaagttctaatattggatagtatgttagagaaattgtagttaacaataatttattgtgtatttcaaaataactagaagagaagaattgcaatgttcccaacataaagaaaagataaatgttttagatgatggatatccccattaccctgatttgatcattgtatatcacacacatgtatcaaagtatcacatgtactccaaatgtttgtacaactatgatatatcaataaaaaaatacaaaataaaaaatgtagctatgaatagtctcattttactgagtgagaaactgaagctgttaagaatcttgtttcagttcacacatctaatatgggatagatctgggattctgatctaaatgacttcaattatccattgactaatatttattartcacttcctgtgtaccaggcactggtaaacaccagaagtaaaacagtagataaaatgggatgccagcttcgaggagcttatagtctaaagacgaatacaaacagtcaaattacaaatatgtaattaagaaatgggatgagtgttctgaagaaagaatgcaggaggagctatgagagctctcagcaggaggacctgctattgaggagggcttccctgagacccacctagagctaaagtctggttagggcactgacccaacaaaatgaatgaaaagagcccggcctttcaggagccgagagcctagaatgtaggtctagtaaataatgagtaaataatcccagtagtgtgatggggaggaggggcctttatgaagtgctgtgacatggaaggaatcagaaagacctggacctggccgggcacaatggctcatgcctgtaatcccagcactttgggaggcccaggcgggcggatcacgaggtcaggagatcgagaccatcctggctaacacggtgaaacctcgtctctactaaaaatacaaaaaattagccaggcatgatggcgggcgcctgtagtcccagctactggggaggctgaggtaggagaatggcgtgaacctaggaggcggagcttgcagtgagccgaaatcgcaccactgcactccagcctggacaacagaacaagatactgtctcaaaaaaaaaaaaaaagaaaagaaaagaaagacctggatctgctccctaccctgtgaccctgtgtaagcatcccttctagaacatctgactctgacaagaaatgtcaagtttgtttgtttgtttttgcataaacccctctgatatggtttggctgtgtccccacccaaatctcatcttgaattcccacgtgttgtgggaggaagccggtgggaagtgattgaattataggggcgggtctttcctgcactgttctcgtggtagtgaatacgtctcacgagatcagatggttttaaaaaggggagtttccctgtacaagccctgttctcttgtctgctgccatgtgagatgttcctttcacctttcgccatgattgtgaggcctccccagacatgtggaactgtaagtcccataaacctctttcttttataaattgtcccatctcagataggtctttatcagcagcatgaaaatgggctaatacagtaaattggcaccagtagagtggggtgctgctgatccaggcctcctgcttttttatttttttgagacagattcttgctctgtcacccaggctggagtacagtggtgcaatctcatctcactgccacttccacctcccaggttcaagcaattctcctgcctcagcctccctagtagctgagattacaggcacgtgccaccacgcccagctaattttttgtattttaatagagacaggatttcaccatgttggccaggctggtctcgaactcgtgacctcaggtgatccacccacctcagcctctctaagtcttctaaaagaaaacaacaaatgagtgaattatcagagataaatattagtatcagggaggctttggtggtattcttttgattctcaaactgtgtaaataataagaacaagagagacaacctatttttaaaacttcataacaggatatacaagtgggagataaacatataaaagcatgctcaactttttagtcatgggaaaatgcaaattaaaattacaatgaaatatcattgcatatctatgatattcttgtctaaagtcaaaaaacagaaaacaaaaaacagcgagtggtaccaagtgttggtgtggatgtgaaacaactggaactctcattcactgctgctgggcatgtacacttgtactatcacttcggaaaacctttccagtatttactaaagccaataatacacacacgctattctccagaaatttcactcctaaaatacatatccaacagaaggaaatatgtgtgcacaacaagacatgtacatgagtgctcatgacaatactgtcccaaactggaagaaacccaagtccccattcacaactgagcaccaattaaataatggaattaaatattcacttgaagaaatactatttag

SEQ ID NO: 95555 - DNA, 38344 bp, Homo sapiens
gtgacccacgctgaggctaagggaatctaagggaaacggatcacaatgacattaggattcagagctgctgacgtcattcctttcataggattcagaagtcaagactcaggaatggctcatatactcagcaatttgggaactcaatatcattacataaagaaccagaaaccaagtgttaaaattggcatctatttcttttccataatcgatgtgaagttctctaacagcctagcaggtttcatgataattttaaaagataataaacatggctgggtatggcggctaatgcctataatctcagcactttgacaggccgaggcaggaggatcccttgagcttaggagttccagattagcctgggcaacacagcaagaccccgtctctacaaaaaacataatttttaaaaaagagaatcaacattgactgaattactcgtgaggcaggtaaggtatgaagtaacttctgtgcatcatctcacttaatcctcacagtgaccagggagattctgttattcctcccagttcaccaacgaggaagctgacacttcagggactactgctcagggaccacagctagtgaaggcagacccatccaaagccgtgtctgcctgcccagagccctagctcacctaacaatggtcgacttggctgggcgtggttattcatgcctgtcattccagctactgctcagggaccacagctagtgaaggcagacccaagatccaatgcatgtctgcctgcccagagccatagctcacctaacagtgattgacttggctgggcatagttgttcatgcctataattccagcactttgggagactgaggcaggaggactgcttgagtcagagccagttcaacaccagcctgggcaacatagtgagaccccatctctttaataaaaaaaaaaaaaaaaaaaaagaccagaccaactaatccacctggtttattatttttttgagagggagtctcactctgtcgcccaggctggagtgcagtgatgagctcacttgacatgtgatgagctttgacatcccaggctcaagcaatcctcccacctcagcctcccaagttgctgggactgagtacaggcacaccccaccacacccaactaattgtagttttttttgtagagatgaggtctcactatgttgcccaggatggtcctgaactcctgggctcaagtgaccctcctgcctcggcctcccaaagggctggattacgagtgtgagccactatgcctggcctttgatgtccttacctttggtgagtaacactttgctgcagcctgccccagctgcagatctcagaattgtccccaggttcccagggtcacggagattgtcacaaatcaataataaaggcagtgaatgctgaagctgagtctttggatatgtcatcttaacatggtcaggcttggcaaaaatccctgaggaaacaaaacaggtggtttacttgcctggtgtgggcacggggaatagtctgacttttcatttacttatcaatcttgatatggtcttagttacataaaaatacaggaatacaggccaggtgtactggctcatgcctgtaatcccaacacttcgggaggccaaggcgggtggatcacctgaggtcaggagtccgagaccagcctggccaacgtggcaaaacctcgtctctactaaaaacacaaagattagccaggcgtggtggcgcatgcctctagtcccagctacctgggaggctgaggcaggagaatcgcttgaatctgggaggtggaggttgtggtgagccaagatcacgccactgcactccagcctgggcgacacagtgagactccctctcaaaaagaaaaaaaaggaaaaaaaaaaccacgaatacattctgattggcaaaattcaaacaacataaaattctaccagtaccactctcctccccctcaactgttctgttttggagtgtatccttttagaacttgttctatgcatctacctatatatatgcacacctgtccatatgtaaatgtgttttacattccgtgtcatactctgtattattctgtaatcgacttatttacgcaacaatatatcttgaacttaccatgtcaatatgtttgaagctacttttttcctttaactgctgtaggctatttttttttgagacagagtcccactctctcactctgttgcccaggctggagtacaatggtgtaatgctggctcactgcaacctctgcctcccgggtttaagcaattctcctgcctctcagcctcccaagtagctgggattacaggcacccgcaaccacacccggctaattttttgtatttttaatagagacgggattttgccatgttggccaggctggtctcgaactcctgacctcaggtgatccaccctcctcggcctcccaaagtgctgggattacagttgtgagccaccatgcccagcctctattttgtagtatgaatgtaccacagttcatttagctcttcccctatggactgttaaattatttgaatttttccctgttacaaatgctgctgcaatgggtatccctgtaggactgtctgtccatgtgtctaaaaatttctctagcataaatacctgtgagtgaaatggacaaatgatgtgcgtgcactattaacgttcacacaggctctttcagtttattcacatcaggaactcataaatacctgttttcggctgggcgcagtggctcatgcctataatcccagcactttgggaggctgaggtgggcggatcacaaggtcaggagtttgagaccagcctgaacaacatggtgaaaccccgtctctaataaaaatacaaaaattaggccaggcacggtagctcatgcctgtaatcccagcatgttgggaggctgaggtgggcggatcatgaggttaggagatcaagatcatcctggctaatacggtgaaaccctgtctctactaaaaataacaaaaaaattagccgggcgtggtgacgggcgcctgtagtcccagctactcgggaggctgaggcaggagaatggtgtgaacccgggaggcggaccttgcaatgagcggagatcacgccactacactcccgcctgggcgacagatcgagacttcgtctcaaacaaacaaacaaaaaacaaaaattagccaggcatggtggcgcatgcctgtaatcccagctactcaggaggctgaggcaagagaattgcttgaacccaggaggtggaggttgcagtgaggcaagatcgcgccactgcattccggcctgggcaacagagacactatctcaaaaacaaaaaacaaaacaaaacaaaacctgttttccagctcaaacccttcttaaaagcgggtctatcatttgtttccatttgtcccaatgtgatagaaaaaacagcatgccattattttaacttgccttttctctgattactagagaagctaaacaccttactgactgactgcgatcttcttcagtgaattcctgtgctcctttaactgtcttgtttctacaacctgtgcccatcttcctaccaggtaggcttttaaaaaatagtttataggcttaaatatttaaaaaacaattattagcctgctatactgatttatctttcctttatcactcattttaaaattcaaactacattcctaggaaaaagaatatgaatttcaaaacttgaatgcatcaaagtaacaacccctttttcaaatacgctggctcagaagcactgtcttagggacatactctgcaaaacgaaggggctgtaggtgcagtgaacgcttgagtcacttccaaggcctcacgctggaggtccagaagcctgggagctttagaatgggtacagccacttactggcgaccgctctgtcctcagtctaatacaaaggagtaaaatggggtctgggactatctgggaaaatgaaaaccctaagtggccttcttagtggaaaattctctccttatttaatgatctctacatgataaaattatatatacattatataataatctacattatataatctctacattattaatctctaaagttttatggaaagaatttatgggaaaagagaaaaattggaaaaaggctaataacaatattaaaaatggctttgagtacatgaaattgctgtggtatagatgaagttattcacatgggtgtatcacatatccacaagtttctttttgaatcaccatgtttactggtagaggtgataatgataaccttttagtaagcttttttttttaagccaagcactaccctaaactctttatgtataattatcaaatattcaatccctttgtagtctgctcccaagggactgtacagtttttttgaatcttactagtattttgtcgtatatgattgctacaataaatgggctactgactgaagtcaggagatgaatgaaatagtacttgtactgaaacatgatacaatcaaagatttaggattctttctaaaagatggtgcaggtaaaaagcctatccaccactgaaggcaatggaagggtattaggcgtctgtgtgctgtgagagagcctccacttcggagtcacagatggccaaaagccattcagtagggctgaggaccttagaagtcctttacttctacttggatgtctgtggtgatgagaacccactatacggaggccctacttatgtcgctggattctggggagtgtctgtctaaagcctgacaggtgctgccagttcctatccatttctcccttattccctgccctcaaatctaaaatatagtaacataaggataagccaggaaatgatgaaagcaggtatgatgatgaagttcaagatgggttggccactgtaagcacacctgccccaagtgacaagcacaagttcaagatgggctggccactgtgagcacacctgccccaagtgacaagcacaagttcaagatgggctggccactgtgagcacacctgccccaagtgacaagcacggtaaaaatgaataacactttcactgaagcatggcgtgtggattagagggctgtagctagtgagaatatggttacttagcatgagtaattctaggtactttagtaatccaagtccccatcctaggatctaagagctctgagtgcagaggcacagatccctgtgactcactgggttacagagacaagagatggttccccagaatctcctctctcagcagttcaaggattcagttttcatatcttaaaactcccatgtcaaaaacgtatgaaaaacttatcttctcatatttagaccaaagactttgtaactgctaatcaacatcggagttacataaggttaagtcagattcagccaaatgaaggaacagactagaagacaaggttctctgtttattgggctaaacggggcagtaaattgtggcttgtacctcgcttcttagatctgcttctggaataagcagtttattgacagttatcaccacattggcagaggttttgcaaaaatgaagggctcaatctttcagtaaacgctttcttaatttttaatctgacatagaaagttgaagaagtaatctaaaaaatagaaggtttgaggaatagtggttcttcctagagaccataaagagccacaacacaaatgatagtgaaaaacgggtttcaatttccattgaaaatactctaagatacacaggtttgagaattatatttttctaattgtaacattttgaatttcatttcaatgctgctgtcctaagacaagtatgagaaattaatcctaggtctccacaccttaagatacactgtgtaaggccaggcatggtggctcacgcctgtaatcccagcactttgggaggccgaggcaggaggatcacctgaggtcacaagttcgacgtcagcctggccaacatggtgaaaccccacctctactaaaaatacaaaaatcacccgggcatggtggcagacgcctgtaatcccagctactgcggaggctgaggcaagagaatcccttgaacccgagaggcggaggttgcagtgggccgagatcgcgccattgcactccagcctgggtgacagaacaagacaaaaaaaaaaaaagatacactgggtaatcactaacccattattccttgtggcgttacgaggtcggaccaatccttgatatcctcaaatttcaccttaatgaggctgacacctttcagcttatcgactggcaactcctttaggtattctagacggctaaagaagaacatttttggcacagctccagccttgagagcgtctgaaatgagcctgcgaccttccagcaggatcttcccttgtttttcccgaaatggcctggactttactattgtcattacactgctgtagatggaaataaaaaaaaaaacaggtaactatcaacatccttgttactgagacacgcttagttgtaacagaaataaagagctacggagagggccgggcgcggtggctcacgcctgtaatcccagcacattgggaggccgaggcgggcggatcacctgaggtcaggagttccagatcagcctggcymacatggtgaaacaaaaacaacaacaaagagctaaggagaaacagaagctaattccaaagacgcttattcggccctctgtgcataatacaaaaaccagcgggctgtactggaagaagtcctccatcggaaggaggttaaggttccgctgtgcgacgggaagggaaacgagaacattcgacaggctcaagaaccacatcacctcagcctcctgtccccgggataagctttatcgtagcgaagcccagactcttcccaggtgctgggagcgcgggatgcggactcctcgagcggttgtttctctcgttgctcctgggcactggcctcagatggtgccttgcggggctgcttcccaggagcgcgcttctgttccaccacctctycggaaggaaacaccactttcactgggctccgccgcagcgcccggacccagcgcctcgcgtcaaggtcccaagcctggaccacctgcagcaacggtcgcacgacaaacctcgmgggtctcaccagcgccgccatgttccctgagacccgggctgcgtcacgaaagcgcgccgtcggcggctagtgacgtcacggcccgtggcgcccttcgtggactgggctgtacggtgcgcgtgacggctgcgtgcggcgggaatcatggctgctcgcagagctctgcacttcgtattcaaagtgggaaaccgcttccagacggcgcgtttctatcgggacgtcctggggatgaaggtgcaggccggggccgacaggggctggcgcgcgaggctggaaccggcgcccgagccggccctggcggagggaggggaaaatgggtgtgtcgtgaacctaagccggagggtgtccgaccttaggccctgcgcggtgttcagcttcaggagcgtggcgagttgccgttggggatcataggccttggagaagggcctaacacgattagtccccgcggtgtgcccacgcacgtcctttcatttaagccactcgtaaacgtttattgagccccgcccttgtggagcttaccgtctaccggaaaagacggtaaataaaatgttatrtaatgctttctagttaatatttgtgttttccggtttggagcctttgatgtagataaaatcagcgtattcagagttctgcttctagcaaggctggtctgaatagtccgtttcggatactcagtctctgaatatatgctccaactctcaacccatctgcttttcaacagcacccagaagcggtctgtctcgggtcctgaggagctgttatttgcaggattcagttggttggggaactgggttttggggacctcctttgataagccagggaggtagggaacacaccactaaggaagacttgaaaggtgcaagagcgcggtttagtgtatagacggtgcaatagacggggatctgaattcrtcaggtcatttttaaaatatctgctattttcagggtactacgttgagttttggcaacaaaggtgcaaatgaccctgatatatatcctccattagagctcatggcctgggttggggtgggagttggaactggatttgtacgtagatgatggtaatggaagtcagaatttgatagtgaaaaaccaccaaactttcgatagcagaaaccacagagctgtcccttgttagtatttcctcgtcgatcaaaaggttgttgcaaagattaaacacgtgccggcgcggtggcccacgcctgtaatctcagcactttgggaggccaaggcgggtggatcactggaggtcaggagttggacaccagcctggccaacatggtgaaaccctgtctctactaaaaatacaaaaattagccgggcatggtggcacacgcctgtaatcccagctactcgggaggctgaggcaagagaatcgcytgtatctgggaggcggaggttgcagtgagccgagatcgcaccattgtgttccagcctggatgacgaaagcaaaactccgtctcaaaaaaaaaaaaaaaaaaaagattcaacaccttattatatgtatagtatttaacatatcggtaatagtagattatataagtgttagccactattataaaaatacaaaagaaggagcggttttccaacctgggtgatgaggaaataattcatgtagaccttgtattcgagttgacttttttttttttttttttttttgaggtggagtcttgctctgtcgccaggctggagtgcagtggcgcgatctcggctcactgtaagctcagcctcccgggttcacaccattctcctgcctcagcctcccgagtagctgggaccacaggcgcgtaccacaacacccggctaatttttaaaaatatttttagtagagacggggtttcaccgtgttagccaggattcgagttgacgtctaaagataggatatccacaggtagatgagaggaggagctacatagtaaaactgaagagccagtgcggagatggcacatgtttgcgaagccgctggttttatgtgcctttagttgaggttgcttagttgaagttaaggagatgggatatcaggatggacaggtcggcattgcttctaatagtatcttgaatgctatgctaaagaatttggattttatgctgcagtaagatgggagctcacttatgttcttaaacagggtggtgatgggatcagtgctttgtgctttaggcatgtgcttttttggtgttattaaggaaggatatcaataaggatttttttattttttattttttattttttttatgttgagacggagtctcgctctttcgcccaggctggagtgcagtggcgcaatctcggctcactgcaagctccgcctcctgggttcacaccattctcctgcctcagcctcccgagtagctggkactacaggcgcccgccaccacgccctgcttattttttgtatttttagtagagatggggttttactgtgttagccaggatggtctcgatctcctgacctcatgatccacccacctcggcctcccaaagtgctgggattacaggcgtgagccaccgcgcccggccaataaggatgatttttaatagtctgagcgaagcgttgggaacttcaactggcaggagccgtgggaatcaaaaaggagggctaaagctaacacgttgagagcccgctgtgtgcagggttctgtgagatgctttcataacatccattcccatcacatgttaggagactgagactcagattctaatttgctcagagttacacaactactaaatgacagaattccaaatcagacttttttttttttttgagtttgagttttgctcttgtcacccaggctggagtgtaatggtgcaatctcagctcattgcaacctctgcctcccgtgttcaagcaattctcctacctcagcctcctgagtagctgggattacaagcgcccaccaccatgcctggctaattttgtattttttatatttttagtagagatggggtttcactgtgttggctaggctggtctcgaactcccgacctcaggtgatctgcccacctcagcctcccaaagtgctgggattacaggcgtgagccacgatgcccatctttttttttttttttttttttttttttaatttgagatggaattttgctcttgtcacccaggctgtagtgcaggggcacgatctcggctcactgcaacctccatctcatggtccaagtgattctcctgcctcaacctcctgagtagctgggatcacaagcacacgccaccacgcctggctaatttttgtatttttagttgagacggggtttcactatgtttgccaggttgatcttgaactcctgacctcaggcagtccacccaccttgatctcccaaagtgctggtattataggcgtgagtcactgtgcccggcccaaatcagacttctttaatgctgaaggccacactttttcccactgcatagcactgcttaccaatctaaatagatttcacaactgatttggtagcctgacccttggtgtcaagctgttcgtccttccactgcttctatcctgggagaagtgtaaagctcatttgcttttgttcttttacaagtaaagcttataaatgataatgtttgtgttttgacattttagtctgtgctaaagacgctgtgagcagtactagcaacacttcacaatttattctaaatctcacaccaggttctgcggcatgaggaatttgaagaaggctgcaaagctgcctgtaatgggtatgataccttgtttcttaaaatctcctttaggctctgactacacccggataacagaagacagtttctcaaagtgagtataaagcagtggaattaattaaggaggcagtaaattagggaggcaacttcaggagcgtcgggaacacatactgtttctctgcactctcatgagtataaagcagtggaattaattaagaaggcagtaaattagggaggcaacttcaggagcgtcgggaacacatttctctgcactctcatacaacacctgtgggacacaaagggattctccagctctctaacaccagccggctgtcctgttatttaattgattctgactctacctggagttaatgtcagatcctgcaagttaagggctcagtcccagaagattttccgccacgtcaggcgccggtcacagtctggatcttcaggatttccgatgaccaactacaagtcagggctcccgctcctgcttccttgggtttgatagtctgctacagtggctcatggaactaagggaaaygctggaaacacttacttacatttactggtttatcataaagagtacgagtcagaaatggctggacagaggagatacacagggcagggcatggggagtgggtggcagagcttccatgctcttctgggcaggctccaatccagcacctccctacgttcagcatcccagaagctcatgagtctcattgttcaagcctaatagagcccagtctccatccctttccttcccagaggttggtggatgggactgaaagttcagtcctctaatcatttgtctttctggtgaccagccccatcctgagtctatgtagaggccccactctaagtcacttcattagcataaactcaggtgtgactgaaaggggctcattatgaatataacaaaagatattcctatcaggaaattccagaggttttgggagctctgagacaggaaccagggacaatgaccagatatgtttcatattatgccacaaatgcaaataagtacatgctctagatgaagcagcggctttccagtatctttttttttttgagacagaatctcactttgtcacccaggtgggagtgcggggtcattatcctggctcactgcaacctctgtcttctgagttcaagcaattctcctccctcagcctccctagtacgtgggactatgggcatgtgccaccatgcccagctaatttttgtatttttagtagagacggggtttcaccatgttggccaggctggtctcgaactcctgacctcaggtgatcctcccgcctcggcctcccaaagtgctgggattacaggcctgagccaccacgcccgtccatctcttaagcttagtaccgtgacaagttggaacagtccaaggcctattaggaatttcatgcttgttgattgatagtcaaggaaataacaggtcagttggagaactgtctttaggattctgttccttgctttacagaaaaggtgaacaaatctttccttcaggtagatgctggatagtctttggagcttgtagtagggtcccatgagcactgcccacagctgctttctgtaccatctgaggtcatctcatccttaagagaacttttaggaccagacaggaatgctcatctctctgtgcccrgtagttctctgggggtggcctgaggctgacttgtctgtagtcactgagttcatttacttttattttctaggccttatgatgggaaatggagtaaaacaatggtgggatttgggcctgaggatgatcattttgtcgcagaactgacttacaattatggcgtcggagactacaagcttggcaatgactttatggtaaataccgtttttttctagcagagttttggctgggggtaggtggctggttgtaaatttgagtagagtgccaagggtgtgtgtgagtgaagagataacatttgagcagagactcaaaagaggtcagggagttagccacgtggatatctgggggatgcgcgttccaggcagagaatattctggcaagagccgtcaggtaacatctggcgtgttcgaggaggtgtaaggaagccagtgtggctggaatagagaacgagaggggagcgtggtaagagatggggtcggcagtgccatggggtaagactgcagggggcctcctaggccgtaagtcaccgagtgaaatgagccattggcggactttgagcaaagggaaaacaaggctggctgcagtctgggggtggactataggatgcgttttggaaagtttactttggctgcagagtgggtaatggatttacaagactggaggcagagaggccattataataaaccgagccagaaacaaggctggtcttctcaaagcacacgtgtacatttctaggcactttgattaaatgtaaggaaaccttgatagtttgcttatttttgttttgtttgttaaaaaagcaagaacaggtcaccttaaataggtwgctagctggcagacccaggtaacatcaagatttctgtggctagatctttagaattagaagacgttatctttggtgttaaatgaatcagacttcactggcatttcaatttctgtcctattattcacaaaggtctgaatgtttgtgggataaaacattgaaaacctgtttttaaatcactagaagaaaatgttggatgccagttaaatcttaggtgattttacctaaaggcagtaggcaataggggttgggctcattgtcttgttctgtaaaatatctgttgtgatcatgtacttggatgtactgttgtttgttgtagggaatcacgctcgcttctagccaggctgtcagcaacgccaggaagctggagtggccactgayggaagttgcagaaggtgtttttgaaaccgaggccccgggaggatataagttctatttgcagaatcgcagtctgcctcagtcaggtaattataccagaaccagtaaaagcctctgtctaaaggcatctttggtgaaaggagagtgagggctgcctgtcttttttttgtagagtctgtgttcacgtgacgtgtcttccccagccagtgcttttacctgttatcggagagactacattctcatatcagaacttaaatacatagcagtaggggatctagactagttctgttctactggtaatgtagtgatttatgattctttcatctgtaaataacagaaaacccaactactttgaacagttatagaatcttttagctcacagagcaggcattctataggtgggaaagatttcaaggttagatgattcaccagctccccacattttctctttctacgttctgttgttctctgcgggtacctctcctagaactagtcccctcaaggttgcaggagagctgccaggagcaggtggggccacatgctcccacaatcccatctggtaggagaggagatgctgacttctttttgctttttttttttgagactctgtcagtccggctggagtgtactggcatgatctctgctcactgcaacctctgcctcccgggttcaagcaattctccttcctcagcctcccaagtagctgggattataggcgccygccaccacgctcagcttttttttttttttttttagtatttttattaacttttaaaaattatttgttttttgagacggagtcttgctctgtcgcccaggctagagtgcagtgctgcaatctcggctcacttgcaacctccgcctcccaggttcaagtgattctcctgcctcagcctctccagtagctgagattacaggcacatgccaccacgcccagctcatttttgtatttttagtagagacagggtttcactatattgtccaggctggtcttgaacttctgacctcacttgatccgcctgcctcagcctcccaaagtgctggggtgacaggcgtgaaccaccgtgcccggccctttttgctttctttttaggagcagaagaaaaactttcctagaatcttccagcaaacttcctgttcagatttgatatactgtgcctgctcctaaaccaatcactggcaagagaaataggatcacccccaaaccatttagccatgcctcctctggagccgaggtcagtttcccagacttgagcgtgggtactcagggatggcatggaagtgaggagcccccacgctgactgccacacagaacaagaaggaaactttgcagggtttgttttgttgactgcagaggcagcctcatcagtgtttcattttgtatttaatgcctgcaaattcagctacctgctctgacaaaacaaaagcaaaaacggggaaaatgctggcgaatggcaagggcacttgtgccgactcccttacttggtgaacgtatgcctgcaagtgggcctgagaagggagtcctggaaattctccttcttcactggtcggcctcctgtccccgatgcccccatgctgagtctgtagaatgttcagtgctccttgtttatcatccggtgctcagcaaaagaaagatccgtctgttccagtgtgggaggctagactwggctgtgtgggactcgtggagagatggtgtttctctgcctcactggtgatttaaagggtgttgatggtgtttttttgttgataggtgattgatcctttgctgactttaaaacttaacgcttgcagctagctccaccatccattttttctctccagccttagtgatatttcagtgcttaaaataatagagagccccatggtgctaagaarcttttgttctttggaatggaaatccccttgggcatttctggttgacaatgtggtcagaccttctgtccggctggcattcatctttcctttgaattacccacttctgtgcagcttcacccacgcgttaacttcctgtcctgcgtcccttcaggctccaagtcaactgggatttgttgattttgaagtaaatggaaagaaaaaaatggagcctgccaggcggaggcacttgtgagaaacagcgtcttaatcccaatattgctgttctagcaaacaggactaaggcagtaaagccaaagaaaaatgtactgaatttatcgtagtcagatggagacgtggaacagctctttagaaagtcactttacaatgtgaaaagtttccagtaacagtaggtgtttcaatatgacttttattctttttacaaaataatcaagttttttccttagacaagcagagaagctgaaaaaaaacacacacacccatgtacccagagagaaccactgctgacattttagagtatatctttccaatcttttgtcaaaaatacgtatatataattaagtgtatacatttctgtatatccttttttaggagttccatcgtattattacattgtaggaagagaaacaattctctattgttggatatttatgtcgttcctagtgttttattgttctaagcaacactggtgaatgtctttgtcgtaaaagcccttcatacatccacaattacctttggagtggctgaaaatggacttgttctttcaaaagcaatgagcactttttaaagcttttggtacattccatcaaactattgcccagaaatgtactgatttacacttgtattacatgattgtgattttcccctctacactaacacagttaacactgccaacttktaacattatttgcacattagttaacaaaggattttatgtgaattctaatttctttgttgtttgggggcgtcgggttgaaattttttttttttttttgagacagagtctcgctctgtcgcccaggctagagtgcagtggcgcgctctgggctcactgcaagctccgcctcccgggttcacgccattctcctgcctcagcctcctgagtagctgggaccacaggcgcccgccagcacgcccggctaattttttgtatttttagtagagacggggtttcaccgtgttagccaggatggtctctatctcctgacctcatgatcctgccacctcagcctcccaaagtgctgggattacaggcgtgagccaccgcgcccggcctgaatattttttcgtatgttatttgaccattctaattccttgttttgtggattattgctttgtgccttttgcctatttttctagcatgttcattcttttcctattgatatttacaggtgatttacatattaaggactttttgtccaatatattgcagttgttccccctactgtgttgtatactctagttttgattgtaattccttttcttggttgttgtctaggagttttccattttgtgtaatttatgtagcagaagttttttcttcatagtttttctatctttggtgtcaggtttaaagaaaaatcttcctctactccaaaattgtataaataatcatctgtatctagtattttcatggtttcattctctaaacttatttttttaacccatcaggaatgtattttgtcatttatttcgaagatgtaagtttttcttaccaaatgattagccagtcttcttagcgccgtccattgaataatgaggcttttcatactgtctttgtttttttttttttttttttttcgagatagggtctcactgtcacccaggctggagtgcagtagtgcagtcttggctcactgcagcctcaacctcccgggctcaagcgatcctcctgcttccatctctgaagtggctgggaatacacacatgagccaccacgcctgtctaatcttttttttttttttttttttttttgagacagagttttgctcttgtctcccaggctagagtgcaayggcgccatctcggctcactgcaacctccgcctcccaggttcaagcaattctcctgtctcagcctcccgagtagctgggattacaggcgtgcgccaccacgcccagctaattttttttattttttatttttagtagagacagggttttgccatgttggccaggctggtctcaaactcctgacctcaggtaatccacttgccttggcctcccaaagtgctgggattacaggcatcagccaccacacccagccaatttttttaaagttttcatacaggcaaggtctcagtgttttacctgcattggtcttgaattcctaggctcacgcaatcctcctacctcagtctcccaaagtgctggcattacaggcatgggccgctgcacccagcttcatactggcttaaaatccctttcttatcataaactgaatttgtaagtatacatgcgcatgttttggtctttctattttattctattaaattgatctgtctattcctgctttattacccaacagatcctgtattaaaagtaactctagcagtgtctgatcttcaaaagtccttgaactactggtgtaatctactgggaatgaaaatttatgaaaaagatgaagaaaagcaaagggctttgctgggctatgctgataaccaggtgagcaatcttggagaagaataacctgttactttgaatttggcttgtaaacgaagcttataaatggcttataacctttataaatgaagttaacatgaaggttgttcccatagtttcttcacagtgattcaatatttatatagataaacagaagaaaataagtgataacctyaccacccagatattaccttgtttatatttggggatatatctcttcagaagtggaattgcttaatccaagagattgaatggatttaatgcaagatctttttcatcttctttttctaataacccagcgtttgagcacgatttagtccttgcactttgaccctgcaattctactcctaggaattattttacagatgtgctcaayatacatcggcacaaagaagtgtgtgcaaggttatctgctgcagcattgtctgtaatcacaatgtgtaagaatttcagtgtcctatagattagagacatatttcagtaatttacggctcattcatggaatggattactatgtcgctagcaaaaagattgaggcaaatctttatgtattgacatggtaacattaagtggagaaaaacaaggaacagaataatttgtaaattataccaccatttgtgtaaaaaaaaaaacrtagatgcgtgcagtgcttctagaaggatacacaggaaastgtggactagttgtctctggggtgagagtaggatagagactcagtttttactttattcctttagtatataatatttgaatttttctaccacatacgtgtaatgaatgtataacctgttccaaaaaataaccccctttcctatttcagtgtaagctggagctacagggcgtcaagggtggggtggaccatgcagcagcttttggaagaattgccttctcttgcccccagaaagaggtaacgcttgataccagatcgtttgagctttctgactagctagttcaacccagctaagaactttgtccttcccttcttgaggtcctttttgattgtggctttagtatcaagttcagcagttgtttcaagagcagctgagataataaattcaaacaaatggcgccttggttctttatggtatctgatactcctctaggactgacgagggccgtgtcctgagtagtgtgtgacccctggctcacgttgcctctgttttcctcaagttgccagacttagaagacttgatgaaaagggagaaccagaagattctgactcccctggtgagcctggacaccccagggaaagcaacagtacaggtggtcattctggccgaccctgtaagtatttctcaggcagggggcaggctggaccaggggtttcttcaaggatgtctttggcaggtgtcttttctctttattggtgtaggacggacatgaaatttgctttgtcggggatgaagcatttcgagaactttctaagatggatccagagggaagcaaattgttggatgatgtgagtcccatttctacatttatgtcaccatgggcctgagagggatggcattaagtgtgtgtgggaggagactaagcaacagggtccaggttcttaatgtcagaaccacgtcctttcgctgttgggttgacctcagccaaggaccgatgtcttcactgccacctgtgtagactgcttgtctagacttagcatttgtgccttaccacaacctcaggctgccctggaaccactgctggtggatctgtgcttattctgctctccacatggagatgcctctatccgaccccctcagctctccccatggagatgcctccatccgaccccctcagctctccccatggagatgcctccatccgaccccctcagctctctgcatggagatgcctccatctgaccccctcagctctccccatggagatgcctctatccgttcccctcagctctcgccagggagatgcctccatccgaccccctcagctctccccatggagatgcctccatccgttcccctcagctctccgcatggagatgcctccatcccatcccctcagctcttgccatggagatgcctccatccgttcccctcagctctccccatggagatgcctccatcccatcccctcagctctccccgtggagatgcctccatctgaccccctcagctctccccatggagatgcctccatccgttcccctcagctctccccagggagatgcctccatctgatcccctcagctctgcagctcctttgatcatctcttctccattctgcagcatcagtctcttctttccagtgagttattctcgccagcgtgcaaacaggygctgaaagctcccatcctttaaaaaccttttactgaccccatatctcctctccagatttctccttctaaaaatctgagtgcgcactgtttctctctctcacatcctctccagatttcttcttctaaaaatctgagtgcgcgctgtttctctctctcacatcctctccagatttcttctaaaaatctgagtgcgcgctgtttctctctctcacrtcctctccagatttcttcttctaaaaatctgagtgcgcgctgtttctctctctcacatcctctccagatttcttctaaaaatctgagtgtgcgctgtttctctctctcacgtcctctccagatttcttctaaaaatctgagtgcgcgctgtttctctctcacgtcctctccagatttcttcctctaaaaatctgagtgcgcgctgtttctccctctcacgtcctctccagayttcttcttctaaaaatctgagtgcgcgctgtttctcyctctcacgtcctctccagacttcttcttctaaaaatctgagtgcgcgctgtttctctctctcacgtcctctccagatttcttctaaaaatctgagtgcgcgctgtttctctctctcacgtcctctccagatttcttctaaaaatctgagtgcgcgctgtttctccctcttatgtcctctccagatttcttctaaaaatctgagygcgcgctgtttctctctctyacgtcctctccagatttcttcttctaaaaatctgagtgcgcgctgtttctctctctcacgtcctctycagatttcttcttctaaaaatctgagtgcgcsctgtttctctctctcacatcctctccagatttyttctaaaaatctgagtgcgcgctgtttctctctcacacatcctctccagatttcttcttctaaaaatctgagtgygcgccgtttctctctctcacrtcctctccagatttcttcyaaaaatctgagtgcrcgctgtttctctctcwcacatcctctccagatttcttcttctaaaaatctgagtgcgcgctgtttctctctctyacgtcctctccagatttcttcttctaaaaatctgartgcgcgctgtttctctctctcacgtcctctccagatttcttctaaaaatctgagtgcgygctgtttctctctctyacgtcctctcyagattttttctaaaaatctgagtgyrcgctgtttctctctcttacgtcctctccagatttcttcttctaaaaatctgagtgcgcgctgtttctctctcacatactctccagatttcttctaaaaatctgagtgcgcgctgtttctctctctcacatcctctccagatttcttctaaaaatctgagtgcgcgctgtttccctctcttacgtcctctccagatttcttcttctaaaaatctgaatgygcgctgtttctctctctcacgtcctctccagatttcttcttctaaaaatctgagtgcgtgctgtttctctctctcacgtcctctctagatttcttcttctaaaaatctgagtgtgcgctgtttctctctcttacgtcctctccagatttcttctctaaaaatctgagtgcgcgctgtttctccctcttacgtcctctccagatttcttcttctaaaaatctgagtgtgcactgtttctctttctcgcctcccattttcacttcagtctgttttgcactggctcttgttactcagtgaagtgcttttgtttcttgccaaatatagcaactacttttagattctcatcaaactcagtaattcagaagcattcaaagtagttgttggatcctagctcctagcacatacctggcatgtactagacgttctgcaaatactttgttgaatgattaaaggaacaaattggtctttcttggttctgtcacgtaactctgtgactgaccttaaacagttgacttaaattctttgaactttagtcttcttatccaaaaatttcagaaaataagaggatctatctcataagwttgttatggtttatagagcttggcaaattactgacataatagtagatgcacaattaacgttaaagcaggcaatgtatagaaaatacagtctttatacattttatcctgaaggaaagtagaatctgtcatcctctcagctgacaaatttgccagactcttcctcctcgctcttaatttaattaaattaattactgaattaaattttttgagatggagtctagctctgtcgcccagggtggagtgcaatggtgcaatcttgcctcactgcaaccttcgcctcccagggtcaagcgattcttctgcctcggcctcccaaggagctggaactacaggcacttgccaccatgctggctaatttttgtatttttagtagagacagggttttgccaggttggccaggctggtctcaaactcctagcctcaagtgatctacccacctcatcctcctaaagtgctgggattacaggtgtgagccactgtgcctggcccattttattttatttattttttgagacggattcttgctctgtcaactaggctggagtgcagtggcataatcttggctcactgcaacctccacctcccgggatcaagcgattctcctgcctcagcctcccaagtagctgggattacaggcacgtgccaccacgcctggctaatttttgtatttttagtagagacggggcttcaccatgttggccaggatggtcttgaactcctaacttcaggcgatccgtctgccttggcctcccaaagtgctgggattacaggcgtgagccaccacgcctgggcccattttattttttttaagacggggtctctctctgtcaccgaggctggagtgcagtggcatgatctcagctcactgcaacctccgcctcctatgttccagtgatcctcccacctcagcctccctagtagctggaaccataggcgtgygccaccatgcctggctaatttttgtattttttctagagatggggtttcaccatgttgcccaggctggtttcaaacttcctgggctcaatcattcgatccatcttggcctcccaaagtgctgggattatagatgtgaaccattgatgaactcctgctccctgagctctcttctcctctgctgttagcgatcctgccatttttcttttttttgagttgggagtctcactctcttgcccaggctggagtgcagtggcgcgatctcaggtcactgcaacctctgcctcccaggttcaagcagttctcttgcctcagcctcctgagtagctggtagctgggattacaggcacgcaccaccacacctggctaatttttgtatttttagtagagatggggtttcaccatgttggtcaggctggttgagtaggccgggtgcggtggctcacacctgtaaccccagccctttgggaggccgaggcgggcggatcacaaggtcaggagatcgagaccatcctggctaacacggtgaaaccctgtctcttgaactcctgacctcaggtgatccaccctcctcggcctcccaaagggctgggattataggcgtgagccactgcgcctggccatcctaccattttcatcttcctgacagtttctcctcagacacgggcacctctttctgtgtctcatcccaaagtgtttttatacccatagccctactttgctgtttttcccattctgcattcttcctccactctgatgagagcttacctgcgacctctccttacctctgccctgaacgtaaccatcatcctggctccagcctcctcacttccagtttttaactccttcctcagctcagacaggtggttgttgttgatgaggcataatttaggtagaatttaaatgtgttttgacggttgtgtttactcatacaaccactactcagaatacagaccattttcccaggaagttccctcatgcccatctccagtgagttggcaccttcatctcccagatcagctgctattctgacttctgtcactgtaggtgagttcgttcttggacttcatacaaatggagtcattcagtattttctttccttttgtgcctggctgcttttactcaccatggctttttttgttttttgttttttgtttttttttgagacggagtctcgctctgtcacccaggctggagtgcagtggtacaatctctgctcactgcaagctccgcctcccgggttcacgccattctcctgcctcagcctaccgagtagctgggactacaggcacctgccacctcgcccggctaattttttgtatttttagtagagacgggtttcaccgtgttagccaggatggtctcgatctcctgaccttgtgatccacccaccttggcctcccaaagggctgggattacaggygtgagccaccscgcccggcctactcaacatggttttgagattccaccatgtaattgcatatcacagctcttttttttttaattgctgactgatactcaattttatgaatataacaatttgctcattcattcttataatggtggacatttggtttatttctagattttttaatctattataaggaagactgccatgaacattctagtgtaaatcttcttgtagatagatgtttcatttctcttgagtaaatacctaggagtagaactgcttttactgtataagaaagtgtcaaacagtcatcgaaagtgatcggaccatcgtttgtccacgagaggtccagtaggtctacattctcaccaacacttattttgctttttgtgggttttttagctattctagcacatgcgaaatggtttcattggtgcaatcaagcgatccttctgcctcagccaccacatagctagggctgcagcactatgcccagctgatgttttttatgtttgtagagacagattctcactgtgttgcccaggctggcctccagtgatccttccagctcggccccacagaggtttaatttttatttccctgatgactaatgatattgagyaccttctcatgtgcttattagccatttacttatttttgtgaattttatgttcaagtcttttgtccattctttaataatttttaatatttcatgatgaaaattccaaatatgcacaaccgaagagagtacgacagagccttacgtgactcttaccttgactctgtactgtagtttttcatcattccttcgtcacttgcaaattcaagtatttttcccagccattaattgagtttttgaagatgaggaattttttattttggtgaagtccagcttatgaactttttctcttacatgtagcactttctctgtccagaccgatgttatatcctgagaacctcttcacctaggaaacctaccacatatcagactcagcgtgtccataacttatcttacctcaaatccattcttcttccagtaatattacataaaggctacttgggagtgtagattctgggaaacctgaatctatgttcccgggctgcagtcttcaagcttggcccagatgaactctctatttatactaaaaatatgtaaataaataaaaataaaaagaaataaatgctactatatcggtacgttcttaagtgctttatttttatttatttatttattttttgagatggagcctcactctgttgcccaggctagagtgcagtggtgtgatctcagctcactgcagcctccgcctcccaggttcaagtgattctcctgcctcaggagagtagctgggattcccgagtagctgggattacaggcacccgccaccatgtccagctaatttttgtatttttagtagagacagggtttcaccattttggctaggctggtctcgaactcttgacctcaggtgatccacctgcctcagcctcccaaagtgctgggattacagatgtgagccaccgcatccaaccttaagtgcttcatatacattctctgattttttttttttttttttagacggagtctcgctctgtcgcccaggctggagtgcagtggcrtgatctcggctcacggcaagctccgcctcccgggttcacaccattctcctgcctcagcctcagcctcccgagtagctgggactacaggcgcccaccaccacacctggctaatttttttgtatttttagtagagacggggtttcaccgtgttagccaggatggtctcgatctcctgacctcgtgatccgcctgcctcggcctcccaaagtgttgggattacaggcgtgagycaccgcgcccagccacattctctgattcttaatataacctgcaaggttgatagcatcagcctttgcaaatgaggaaaccgaggctaagaatgagtaagtcattggccctcacccttgaataccatacactgagtaagtggcaggcaggggcctggatggtgatgaaattattccccttcatccctgaagatcacgcactgagtaggtgcaggccggggcctggatggtgatgaaattattccccttcatccctgaagatcacacactgagtaggtgcaggcaggggcctggatggtgatgaaataattattccccttcatccctgaagatcacgcactgagtaggtgccggccggggcctggatggtgatgaaattattccccttcatccctgaagatcacgcactgagtaggtgccggccggggcctggatggtgatgaaattattccccttcatccctgaagatcacgcactgagtaggtgcaggccggggcctggatggaagcctttcaggctttacagttagtcctttttcttcctctgcgccctgctccctccctggacagtacagcgtgtctgtgatcccagttgttcacgctggaatcctcagagccagttttggtgttattttgttgtgttttgttttttaacatttaatagtcgttttagatttacagacagtcacttttgaccattatttctcctcatccttaaattattttagctattagtcaccaagagctgtgagttctacctctgaaatgtcttctgcctatcagctttccctttgaaaggcctcattgtcaacttacggtctgtcccaaagcaaacagccagtaatttttaaaaccgtttaatccgatagctctctcttgcctctgagataaatttcaaactctctgacagagcatgtgacatttttggacattctctaccctctgaccttctttcccacctgcctccctaagtcccctaactcatccctattccagtcccactgaactggttatattagctaagatacttcttcttgcatccaacccaaagggttttttccctctcctcttttacttgtccttcaacacttaaaagctttcttaggttcagccgggcgcgatggctcacccctgtaatcccagcaccttgggggaccaaggcgggtggctcacctgaggtyaggagtcccagaccagcctgaccaacatggtgaaaccctgtctctactaaacacaaaaaattagccaggcacggtggtgtacgcctgtaatcccagctacttgggaggctgaggcaggagaatcacttgaacccagaaggcagaggttgcagtgagccgagatggcgccgttgcactccagcctgggcgacaagagcaaaactccatttcaaaaaagaaaaaaagctttcttaggttctccaaataatttagttgttctttcctcccactttttatggctcctaaaagacagaaacgtgcatatttgtgacttgtggtttttttaagcatatctttgatttttaaattcttattttcatcaagataataaatcagatagtactaagattttttagaaatgaaacggtccaactctgagtcacactacctaggacagccactttcaccttcactgtttctaaataataaatatatttgtttcttctttttcaattgccacctcatcttgtgacttcctgctgaggtagatattatagcaaatgcttcaagacacacacatgcgtacacacactctgtcatgcaaaatacttgtttccatatctgagttctcagctgttctgcacactcctcaaagcttccgactgtctctgctgccacatctgaacccagcgtggtacctggctctttttgactacataaatgagtgtttgtccttactaaacaacgaaagggatgcttgtggaaccaaaacattattgttaaggctttgtattattcatttatttttatttgtatctgtatgtatrtatatgagacggggtcccactctgttacrcaggctgaactcgaattcctgagctcacgtgatcctctggcctcagcctccaagtggctgtgactataggtgtgaccactgggcacggcttaaggcttcctttttaattaagatgcccaaactaaacagaaccaacatcagaagagtaggccgggaggagacttacgaaaaaggaatcattccaggcttcatcactaaaacatcacgtagagtttcatatttggcctcactatcagactgagtttcatgacactaaagattcttgagcgtctgcccagatgctgtgagtggcaggacttgctcttttaccagagatcctaccgcctggcatgcgggtccctgacctcgttggtccgccagccacacttcctggctacaggcttggtttgcccttgactctgccgagtgaggatccacagttgctcattatcaccagtatctcttgccttattgaacataacactctgtactggattaatactctttaaatgttaaaaaattttttttatttctcttctcttttttttggagcgggggtttgggtcctttttttaatgttaattttttttattgtggtcagtacagtgagatataaagtgggctatgtcttttgtttttcaggcttggagtcagtgtatattctatttctattttacaggcaatggcagcagataaaagtgacgagtggtttgccaaacacaataaacccaaagcttcaggttaacggaagacatgatgcagagcaagcctctgtgattcctgcccagcacctgtgaggcctgacgtgtcagttcccaataaatgctcttctgatttgtttcccgtacaggcaaggaggcttgggtagtgcagatttgtgtatttcaatctttgaaagctctgatgtaatttagaaatgaaatccaatcatgagtccaggtagagaacgcctgctgtaatctacactgttgctgggactgcgcattctgtatataactgtgttggatgagtgacagatgattgtccagactaggacagcggcatgaacatgactttggttgggattgcggatagttagggttacctctgaatcgtgtagcttttatgagagcagctgtgcaagtgaatccacattaatgccttgtcgtggtgccattcccagcgcctgacgatacgctcttctattgtcttattctggcaggttttgacgttttaaattttttaaagaaattttattccttggaccaaaaggtttggttaaccacccccctcttacttgctttcacattttgagtgtccagaggaaacagaaaggaatgagtgtgtgacgttgctgcacgcctgactctgtgcgagcttctttctgtgtatatattttgttttatttttttccgtgtatatttttaatcccgacagaacatcatgtgagatttctttaaaatggattaaacgatttcttcagcctgaaaaaaaaggttttgaaaatgttttcttgtagttttgtttggttctaaacaacaaataggttttaatcactcgaaatggaattatattgtgtattcattgaataaattttttttgaaagtaagcttctgaaatcaagctgtgataccagtctctaagtctcatcatgtaaagtggtggccaggttcagatttttaaaaataaacttaggagattggaagggattgactcagaggatcctggttcccaaagaacacatagagaattacttgtaaatcgtaacctctgctttcctcccttactggcagggcgtagggcatcgaaattttggttgtatttgagcttatcttcttataggggtgatgctattataccttcacggagagaaataaattctcatccagctctacaacttttcattcagcttgaattccatatcctagggaagcagtcttgagtttcaaagcaaaccaagttatatatatggccctcctctaggtaattggttctttttattttttattttttttttttgagacagagtttcgctcttgttgcccaggctggagtgcaatggcgtgatcttggctcactgcaacctccgcctcccggtttcaagcgattctcctgcctcagcctcccaagtagctgggattacaggcatgcgccaccacgtctggctaattttgtatttttagtagagatgggctttctccgtgttggttaggttggtctcgaactcccgacctcaggtgatccacctgcctcagcctgggattacaggtgtgagccaccgtgcccttctctttttttttatacatgtggaaattattatatgaactttgaataaccaggtaaacttctgcttctctttagaatgtatgttaattttccaattttctattagattattaagtaatttttaatgttcatctctagtaatattgtccttgtgaaaagaaactccttttcccagtgtattgggctgctataatgtggccctcgaagtttgttgtagtaaaataagtggtttatataagtaccgaataactaaataacacacacaggtttcccttttatctgcttatcttgtattttggcgtaccaaaacgtttttctcctaaatatacaactgtgcatgatagtgggcaccatgcagggtgaacagtaatgctgtttgtctgcataggacattttggctttaggagatctgcctccttttatttatttcattgcctgtcatgtctcgctttgttgcgttttgtttttgcttttgtttttgtttttttttaagacggagtttcactcttgttgcccaggctggagtgcaatggcgcaacctcggctcaccgcaacctctgcctcccgagtttgagcgattctcctgcctcagcctcccaagtagctgggattacaggcatgtgccaccacacatggctaattttgtatttttagtagagacgggttttctccatgttggtcaggctggtcttgaacttctgacctcaggtgatcagccacctcgtcctgttggcgttttttaacattttattcatcctaaagccctctagtgtacaactttggctttttatcaaggcatccagaagcttgcttctgcacagttcagctaagtaattctaaaccaaaaaagagtaatttttaaaaattattatttaggccgggcgcggcggctcaagcctataatgccagcacgttgggaggctgaggcaggcggatcacctgaggtcgggagctcgagaccagcctgaccaacacggagaaaccccatctctactaaaaatacaaaattagatgggtgtggtggtacctgcctgtaatcccagctactcaggaggccaaggcaggagaatcccttgaacctgggaggcggaggtcgcggtgaagcgagatcacgctgtcgcactccagctgggcaccaagagcgaaactccgtctcaaaaaaaaaaaaattatttagacgcccattagatccgcaaaaactaattttaaacaaaagtgattagtttcccacatctgggggatatgatcaattagaaaatggcatgaggaagatagctttgcccaagctggtgtttcatttttggtttttgagacattgctctatcacgcagggtggagtgcagtggggcaccatcgtggctttctgcagccttgacctctggggctcaagagatcctcccacctcagcctcccgaatggctgggcccacagccacgtgccaccacacccagccaacgttttgatcttttgtagcgaccgtctcactgcgttgttcaggctgcaagctgttgtttcaaacagatgaagttggaaagttcttcagcttctccagagttgtttttttgaatcaaggggttgtggagcctacatgtaaatacaagtgtgccttgagttaaatctccgggaagacttagaacggccgtgttgccagagctctcctagttagcctgcaggactgtctgaagtccgtgtccgtctgacatgttaccggaattaacaaacctagggacggtgagtgctccttcatgtggctttctggctctctcacctgccactcagtgccgctgtgacttagcagccagagttttcaggagacctccaacgtgtccgttgaaattcagggtaagagttgagaagtttccctgtttgttctaagagttcttaccccaacctcaggggaaatcaatagtaaatttactctgacttcaatgataataaagaagtgcccttgcctcatcctctttatataaagcaatagagccacatggttcaaaaatgaaaacaatatgaaaaggtattgtaaaccgggtaagtgtctgagacaagtctcgcccatttagaggtttattttgccaaggctgaggatgtgcctgagacacaaccacagatctgtggcccccgcacactttccagagaggatttttagggcctcagtatgtgggatatgacgacgtttctcttcaaataatctgatcaatcttttattctttaattcatagcgccccgccccctttttctccttttccctttttgcctttgtgagatgcccaggcacgccacagcaccaggcgttatcagtaccagctcacattcctttccttatttggaaagaggactaactttctagctcattacagacaccccttccccttcctctccgctttcttttacgggcccaccctatctaaaaaaatcaaatgtttagccaagcgcgattagtttagattgtacgacctgaccccggccaatggggaaagggtagaggggcaggacttgtgtcaggaacaaaggctctcgtgccyctttgttcaggtgtgctctcatgacaactggccaaggaggcacccctctgcacagaagtaaaattgctttgctaagaatcctttgttcgagtgttctatttccttaggattttgagcattattcctaacaagtatttaaaagggaaagagcaggaagggagggaagagggaaaggaaaaatacaggagggtaggtagggagataagtggttacattcttattaggctttgatcagcgctcaccaaatctacatgtcacagtgaaaggagggggtagaggaacagtcagttttgcattcagctcagtaaatctacatttagcactcaccaaatctacatgttacagtgaaaggagcaggcagaggaacagtcagttttgcattcagctcagtaaatctacatttagtgctcaccaaatctacatgttacagtgaaaggagcgggcagaggaacagttacgcattcagctcagtaagtctacatttagcactcaccaaatctacatgttacagtgaaaggagcaggcagaggaacagtcagttttgcattcagctcagtaaatctacatttagcgctcaccaactctacatgttacagtgaaaggagcgggcagaggaacactcagttatgcattcagctcagtaaatctacatttagtgctcaccaaatctacatgttacagtgaaaggagcgggcagacgaacagtcagttatgcattcagctcagtaaatctacatttagcgctcaccaaatctacatgttacagtgaaaggagcgggcagaggaacagttatgcattcagctcagtaaatctacatttactgctcaccaaatctatatgttacagtgaaagcagcaggcagaggaacagttatgcattcagctcagtacatctatgttttgtctcggctggtgagggatggtttctggtgttgtctttgtcccttacctatgaagataagctgttaatttatattgtcaggtgagggagaccacctggggagatatgtggccttctgtcttgtagcttatctgtttaggaacaaaaggaagttttttgcatattccatgactcaatttccaagcttaacttttccttttcgcttagtgaatttggtcccaagattttattttcctttcacagtataccccatgcccatcaatcccattccccctgcatcctataggtaacctcttcttaagcaaatacaaatagataaatccttattttctgtttttttttttaaaactttattttactgttactttctgctgtcctaattatggcacatttttactttctaggttctgtgatttacagagtggtctggctatgtggacagcttctaaattgtcaccacattttggagcaagatgtattatttttacaattaatttacatttaacatgaatcatgatcctaagtgcatcagaatgtcttcataacattcgccaaagaagagagggcagcactgctgttctacagtgtggctctcacctggtccacagttaccagaaatagttctttcgttgctgtgatgtcctgggtgggcttcattctttagtaatgtactttgtctacagcaacttcctgcaactatgtgaacagatcttgaagacacacagtgaggtttggtttcctttgtcctcttaagtctttatggttgttgcttctattgtttattggtcccagtgagaactgcagctgacctgatgtcatgatctgtgaagatagtttctattaaagaagaagtaccaggaaatcccatatgccaccgtagacctgcctttctggataccatttactactccatactccagccgccatgcacaatggttgtgtatgaggctcctgtgatcattaacaggagtagaagctgggctcagacactctggcacttgcataggtcaaggggtgtgttgtgctcttgcaacaaatcccacatagacatccatatgcatattgtcccaccgtcccctaagcagaaaccagggttaagtacagaatagtcccgggaacattttggttgcccggccttaggtgagcctttctggggctgggattttgacaccatctgctccattgtttctaaactgctgtgttctggcgcatcaattgtttcatcacattatcatcacggaaagcttggtctccctcaaaacatgaaccgggtaggccctgtgttccagtgggggcttttggacttgactttagtgtttaggaggacagagtccctctcccctctgtggtgctggggtattagtaaatcagccttgaagagataaggggctggggcctcaacctcccaagaggctgtcactggagaatggtctcctgccctcagatcttgggcatttccacagcacactgtccccctcgtccttccaaatacctacatacgctcttgtaataggagagctgggaactccacccaaaaccatacaaaaagttagtctgtgtatttggacgcctccccagcactcagtcacygagtttctcctttccaacagcagtcactctcatgcagtttaagtgatttattgatgtctcggctaagcttgcgacagtttcaggacatttcagccatcaaggtctaagaagccctttccattcccgaggagccctcagccagcctccttcttcctcatctcctcactctggccgcgtagcccctcatggcgtccatcttggacgcccctttgttcgcgctccacgccccccacttccttcttcgtcagctcctccactttggccgcgtagcccctcatggcgtccatcttggacgcccctttgttcgcgctccacgccccccacttccttcttcgtcagctcctccactttggccgcgtagcccctcatggcgtccatcttgsacgcccctttgttcgcgctccacgccycccacttccttcttcgtcagctcctccactttggccgcgtagcccctcatggcgtccatcttgsacgcccctttgttcgcgctccacgccycccacttccttcttcgtcagctcctccactttggccgcgtagccyctcatggcgtccatcttggacgcccctttkttcgcgctccaagcctcccacttggccctggctctcacgtctgaggccggagggccggggatgtcgcagtcgccctgggtggcctgtttgtacaagccgtagaccagcagcttctcctgatcgctcacgggacccttcagctgcttgagggccgcgcagctcgaactccacttggcacatggggtggtggaggcggtccctggtgctagaagctggaggtggagagttggagtggctgttactactcgatctcagggggaggagacaggcacgcgatgtttgtgttttgtcaagcacagattgcaagctcggggtccagcgtaaaccccaccatgtttgggctcacacggcgcattttctggggaggaccagccgtcaaaaagcgtctaggatccggaacgctgctgtctggagggggcggcgcggcaggagcgcgttgagggactgtatgtggcgcgagctgggcgggtgggagtggaagcctcgcgtggtgcggccgcgctgggtggtgggcgtcccgggggaggcgctcggtgggggtgaactgtgtgcggggcacgcccggggttaccgggtgagggtgaatgcggggccggggaatcatgagcccgacccgctgggaccccggaagaggggccgggcaggggacggtgcggaggggtctagtgagcgacgtccgggtacctgagggctggtgggagggctctgccggaaggcggcgctgtgcgcttggcgcgctcgttcgtgaggactgcgcgtgcgcggcggaggctgtgggcggggccgggcggaggttgtgagcaggcctaagcgcggccgccgtggctcctgcgtctcccatcgtgccgtgcgtcccgcgccgcgttcgagttctcggaggggagggggcgttagccccgcgcagccgccggcgtcgccgccatggacctaggtgggtgccgcggctccccggcccmgggctgcgtccagcaatgcgccaccagagcggtgctgccccgtcgcgtctcctcytgtcgcgcacgctcgcgcgggcccggaccgaaacgtcccccgcgtcggggcgggtctaggggtcccggggtggccttggcggggggtggtccgggtcccgccgcgcgttgggccgcgtcttgccgcctccggccccctgcgcttgaaaacacggagcagacgtgaagttagagcccttggaagcgcccggggctcgcgcacgtgctttgggaaacgggctccctccgagcacccctgggcgccccgacggcctcatttcctgaacggcagctgcgttcttgagcaagtgtcttaacgctccaagtgtcttacgctcatgacgtttcctcatcgacagagcggggagaatggaagtgtgtctccccactgagttttgggcgactttgcattgagatcgccgaggtacagtgtcccttgtggggttgcgcgggtcacacccgcggtgggggcggctgcgctcctgaggtatcactttgtgaacctgcgtgcgtccggattcagaatcttacaggcaaggtctgggagggagcccataggaactagatgctccctgctaaatcttggcacacgctgctaagaccaggaggctgttctgggagagctgggggtgaggcaccccgagatgtgtcagcagtagtaggctggggggaaatggtctggtccccgcccccagacagcttttcaggagcggaatggcagagctctaagggcttggagcccctcagccgtaattgcttcccagccccaccacattcaggctgggacaccctcagcaaatcgtttctgcgcctcagtgtccttatctctagagcaggaatactagtcctcaaaaggtgattgtgaatagaagagatcttacctgtgtaccacctagcacagtgtctggcatggagtaggtgcttaataaacctaagaagcgggctgtggcaagcactagttaaccatccatgatagagy

SEQ ID NO: 95556 - DNA, 22160 bp, Homo sapiens
gagaagaccagccttgtttctggctcggtttattataatggcctctctgcctccagtcttgtaaatccattacccactctgcagccaaagtaaactttccaaaacgcatcctatagtccacccccagactgcagccagccttgttttccctttgctcaaagtccgccaatggctcatttcactcggtgacttacggcctaggaggccccctgcagtcttaccccatggcactgccgaccccatctcttaccacgctcccctctcgttctctattccagccacactggcttccttacacctcctcgaacacgccagatgttacctgacggctcttgccagaatattctctgcctggaacgcgcatcccccagatatccacgtggctaactccctgacctcttttgagtctctgctcaaatgttatctcttcactcacacacacccttggcactctactcaaatttacaaccagccacctacccccagccaaaactctgctagaaaaaaacggtatttaccataaagtcattgccaagcttgtagtctccgacgccataattgtaagtcagttctgcgacaaaatgatcatcctcaggcccaaatcccaccattgttttactccatttcccatcataaggcctagaaaataaaagtaaatgaactcagtgactacagacaagtcagcctcaggccacccccagagaactactgggcacagagagatgagcattcctgtctggtcctaaaagttctcttaaggatgagatgacctcagatggtacagaaagcagctgtgggcagtgctcatgggaccctactacaagctccaaagactatccagcatctacctgaaggaaagatttgttcaccttttctgtaaagcaaggaacagaatcctaaagacagttctccaactgacctgttatttccttgactatcaatcaacaagcatgaaattcctaataggccttggactgttccaacttgtcacggtactaagcttaagagatggacgggcgtggtggctcaggcctgtaatcccagcactttgggaggccgaggcgggaggatcacctgaggtcaggagttcgagaccagcctggccaacatggtgaaaccccgtctctactaaaaatacaaaaattagctgggcatggtggcacatgcccatagtcccacgtactagggaggctgagggaggagaattgcttgaactcagaagacagaggttgcagtgagccaggataatgaccccgcactcccacctgggtgacaaagtgagattctgtctcaaaaaaaaaaagatactggaaagccgctgcttcatctagagcatgtacttatttgcatttgtggcataatatgaaacatatctggtcattgtccctggttcctgtctcagagctcccaaaacctctggaatttcctgataggaatatcttttgttatattcataatgagcccctttcagtcacacctgagtttatgctaatgaagtgacttagagtggggcctctacatagactcaggatggggctggtcaccagaaagacaaatgattagaggactgaactttcagtcccatccaccaacctctgggaaggaaagggatggagactgggctctattaggcttgaacaatgagactcatgagcttctgggatgctgaacgtagggaggtgctggattggagcctgcccagaagagcatggaagctctgccacccactccccatgccctgccctgtgtatctcctctgtccagccatttctgactcgtactctttatgataaaccagtaaatgtaagtaagtgtttccagcgtttcccttagttccatgagccactgtagcagactatcaaacccaaggaagcaggagcgggagccctgacttgtagttggtcatcggaaatcctgaagatccagactgtgaccggcgcctgacgtggcggaaaatcttctgggactgagcccttaacttgcaggatctgacattaactccaggtagagtcagaatcaattaaataacaggacagccggctggtgttagagagctggagaatccctttgtgtcccacaggtgttgtatgagagtgcagagaaatgtgttcccgacgctcctgaagttgcctccctaatttactgccttcttaattaattccactgctttatactcatgagagtgcagagaaacagtatgtgttcccgacgctcctgaagttgcctccctaatttactgcctccttaattaattccactgctttatactcactttgagaaactgtcttctgttatccgggtgtagtcagagcctaaaggagattttaagaaacaaggtatcatacccattacaggcagctttgcagccttcttcaaattcctcatgccgcagaacctggtgtgagatttagaataaattgtgaagtgttgctagtactgctcacagcgtctttagcacagactaaaatgtcaaaacacaaacattatcatttataagctttacttgtaaaagaacaaaagcaaatgagctttacacttctcccaggatagaagcagtggaaggacgaacagcttgacaccaagggtcaggctaccaaatcagttgtgaaatctatttagattggtaagcagtgctatgcagtgggaaaaagtgtggccttcagcattaaagaagtctgatttgggccgggcacagtgactcacgcctataataccagcactttgggagatcaaggtgggtggactgcctgaggtcaggagttcaagatcaacctggcaaacatagtgaaaccccgtctcaactaaaaatacaaaaattagccaggcgtggtggcgtgtgcttgtgatcccagctactcaggaggttgaggcaggagaatcacttggaccatgagatggaggttgcagtgagccgagatcgtgcccctgcactacagcctgggtgacaagagcaaaattccatctcaaattaaaaaaaaaaaaaaaaaaaaaaaaaaagatgggcatcgtggctcacgcctgtaatcccagcactttgggaggctgaggtgggcagatcacctgaggtcgggagttcgagaccagcctagccaacacagtgaaaccccatctctactaaaaatataaaaaatacaaaattagccaggcatggtggtgggcgcttgtaatcccagctactcaggaggctgaggtaggagaattgcttgaacacgggaggcagaggttgcaatgagctgagattgcaccattacactccagcctgggtgacaagagcaaaactcaaactcaaaaaaaaaaaaaagtctgatttggaattctgtcatttagtagttgtgtaactctgagcaaattagaatctgagtctcagtctcctaacatgtgatgggaatggatgttatgaaagcatctcacagaaccctgcacacagcgggctctcaacgtgttagctttagccctcctttttgattcccacggctcctgccagttgaagttcccaacgcttcgctcagactattaaaaatcatccttattggccgggcgcggtggctcacgcctgtaatcccagcactttgggaggccgaggtgggtggatcatgaggtcaggagatcgagaccatcctggctaacacagtaaaaccccatctctactaaaaatacaaaaaataagcagggcgtggtggcgggcgcctgtagtaccagctactcgggaggctgaggcaggagaatggtgtgaacccaggaggcggagcttgcagtgagccgagattgcgccactgcactccagcctgggcgaaagagcgagactccgtctcaacataaaaaaaataaaaaataaaaaataaaaaaatccttattgatatccttccttaataacaccaaaaaagcacatgcctaaagcacaaagcactgatcccatcaccaccctgtttaagaacataagtgagctcccatcttactgcagcataaaatccaaattctttagcatagcattcaagatactattagaagcaatgccgacctgtccatcctgatatcccatctccttaacttcaactaagcaacctcaactaaaggcacataaaaccagcggcttcgcaaacatgtgccatctccgcactggctcttcagttttactatgtagctcctcctctcatctacctgtggatatcctatctttagacgtcaactcgaatcctggctaacacggtgaaaccccgtctctactaaaaatatttttaaaaattagccgggtgttgtggtacgcgcctgtggtcccagctactcgggaggctgaggcaggagaatggtgtgaacccgggaggctgagcttacagtgagccgagatcgcgccactgcactccagcctggcgacagagcaagactccacctcaaaaaaaaaaaaaaaaaaaaaagtcaactcgaatacaaggtctacatgaattatttcctcatcacccaggttggaaaaccgctccttcttttgtatttttataatagtggctaacacttatataatctactattaccgatatgttaaatactatacatataataaggtgttgaatcttttttttttttttttttttgagacggagttttgctttcgtcatccaggctggaacacaatggtgcgatctcggctcactgcaacctccgcctcccagatacaggcgattctcttgcctcagcctcccgagtagctgggattacaggcgtgtgccaccatgcccggctaatttttgtatttttagtagagacagggtttcaccatgttggccaggctggtgtccaactcctgacctccagtgatccacccgccttggcctcccaaagtgctgagattacaggcgtgggccaccgcgccggcacgtgtttaatctttgcaacaaccttttgatcgacgaggaaatactaacaagggacagctctgtggtttctgctatcgaaagtttggtggtttttcactatcaaattctgacttccattaccatcatctacgtacaaatccagttccaactcccaccccaacccaggccatgagctctaatggaggatatatatcagggtcatttgcacctttgttgccaaaactcaacgtagtaccctgaaaatagcagatattttaaaaatgacctgacgaattcagatccccgtctattgcaccgtctatacactaaaccgcgctcttgcacctttcaagtcttccttagtggtgtgttccctacctccctggcttatcaaaggaggtccccaaaacccagttccccaaccaactgaatcctgcaaataacagctcctcaggacccgagacagaccgcttctgggtgctgttgaaaagcagatgggttgagagttggagcatatattcagagactgagtatccgaaacggactattcagaccagccttgctagaagcagaactctgaatacgctgattttatctacatcaaaggctccaaaccggaaaacacaaatattaactagaaagcattatataacattttatttaccgtcttttccggtagacggtaagctccacaagggcggggctcaataaacgtttacgagtggcttaaatgaaaggacgtgcgtgggcacaccgcggggactaatcgtgttaggcccttctccaaggcctatgatccccaacggcaactcgccacgctcctgaagctgaacaccgcgcagggcctaaggtcggacaccctccggcttaggttcacgacacacccattttcccctccctccgccagggccggctcgggcgccggttccagcctcgcgcgccagcccctgtcggccccggcctgcaccttcatccccaggacgtcccgatagaaacgcgccgtctggaagcggtttcccactttgaatacgaagtgcagagctctgcgagcagccatgattcccgccgcacgcagccgtcacgcgcaccgtacagcccagtccacgaagggcgccacgggccgtgacgtcactagccgccgacggcgcgctttcgtgacgcagcccgggtctcagggaacatggcggcgctggtgagaccckcgaggtttgtcgtgcgaccgttgctgcaggtggtccaggcttgggaccttgacgcgaggcgctgggtccgggcgctgcggcggagcccagtgaaagtggtgtttccttccgragaggtggtggaacagaagcgcgctcctgggaagcagccccgcaaggcaccatctgaggccagtgcccaggagcaacgagagaaacaaccgctcgaggagtccgcatcccgcgctcccagcacctgggaagagtctgggcttcgctacgataaagcttatcccggggacaggaggctgaggtgatgtggttcttgagcctgtcgaatgttctcgtttcccttcccgtcgcacagcggaaccttaacctccttccgatggaggacttcttccagtacagcccgctggtttttgtattatgcacagagggccgaataagcgtctttggaattagcttctgtttctccttagctctttgttgttgtttttgtttcaccatgtkrgccaggctgatctggaactcctgacctcaggtgatccgcccgcctcggcctcccaatgtgctgggattacaggcgtgagccaccgcgcccggccctctccgtagctctttatttctgttacaactaagcgtgtctcagtaacaaggatgttgatagttacctgtttttttttttatttccatctacagcagtgtaatgacaatagtaaagtccaggccatttcgggaaaaacaagggaagatcctgctggaaggtcgcaggctcatttcagacgctctcaaggctggagctgtgccaaaaatgttcttctttagccgtctagaatacctaaaggagttgccagtcgataagctgaaaggtgtcagcctcattaaggtgaaatttgaggatatcaaggattggtccgacctcgtaacgccacaaggaataatgggttagtgattacccagtgtatctttttttttttttgtcttgttctgtcacccaggctggagtgcaatggcgcgatstcggcccactgcaacctccgcctctcgggttcaagggattctcttgcctcagcctccgcagtagctgggattacaggcgtctgccaccatgccmgggtgatttttgtatttttagtagaggtggggtttcaccatgttggccaggctgacgtcgaacttgtgacctcaggtgatcctcctgcctcggcctcccaaagtgctgggattacaggcgtgagccaccatgcctggccttacacagtgtatcttaaggtgtggagacctaggattaatttctcatacttgtcttaggacagcagcattgaaatgaaattcaaaatgttacaattagaaaaatataattctcaaacctgtgtatcttagagtattttcaatggaaattgaaacccgtttttcactatcatttgtgttgtggctctttatggtctctaggaagaaccactattcctcaaaccttctattttttagattacttcttcaactttctatgtcagattaaaaattaagaaagcgtttactgaaagattgagcccttcatttttgcaaaacctctgccaatgtggtgataactgtcaataaactgcttattccagaagcagatctaagaagcgaggtacaagccacaatttactgccccgtttagcccaataaacagagaaccttgtcttctagtctgttccttcatttggctgaatctgacttaaccttatgtaactccgatgttgattagcagttacaaagtctttggtctaaatatgagaagataagtttttcatacgtttttgacatgggagttttaagatatgaaaactgaatccttgaactgctgagagaggagattctggggaaccatctcttgtctctgtaacccagtgagtcacagggatctgtgcctctgcactcagagctcttagatcctaggatggggacttggattactaaagtacctagaattactcatgctaagtaaccatattctcactagctacagccctctaatccacacgccatgcttcagtgaaagtgttattcatttttaccgtgcttgtcacttggggcaggtgtgctcacagtggccagcccatcttgaacttgtgcttgtcacttggggcaggtgtgctcacagtggccagcccatcttgaacttgtgcttgtcacttggggcaggtgtgcttacagtggccaacccatcttgaactycatcatcatacctgctttcatcatttcctggcttatccttatgttactatattttagatttgagggcagggaataagggagaaatggataggaactggcagcacctgtcaggctttagacagacactccccagaatccagcgacataagtagggcctccgtatagtgggttctcatcaccacagacatccaagtagaagtaaaggacttctaaggtcctcagccctactgaatggcttttggccatctgtgactccgaagtggaggctctctcacagcacacagacgcctaatacccttccattgccttcagtggtggataggctttttacctgcaccatcttttagaaagaatcctaaatctttgattgtatcatgtttcagtacaagtactatttcattcatctcctgacttcagtcagtagcccatttattgtagcaatcatatacgacaaaatactagtaagattcaaaaaaactgtacagtcccttgggagcagactacaaagggattgaatatttgataattatacataaagagtttagggtagtgcttggcttaaaaaaaaaagcttactaaaaggttatcattatcacctctaccagtaaacatggtgattcaaaaagaaacttgtggatatgtgatacacccatgtgaataacttcatctataccacagcaatttcatgtactcaaagccatttttaatattgttattagcctttttccaatttttctcttttcccataaattctttccataaaactttagagattaataatgtagagattatataatgtagattattatataatgtatatataattttatcatgtagagatcattaaataaggagagaattttccactaagaaggccacttagggttttcattttcccagatagtcccagaccccattttactcctttgtattagactgaggacagagcggtcgccagtaagtggctgtacccattctaaagctcccaggcttctggacctccagcgtgaggccttggaagtgactcaagcgttcactgcacctacagccccttcgttttgcagagtatgtccctaagacagtgcttctgagccagcgtatttgaaaaaggggttgttactttgatgcattcaagttttgaaattcatattctttttcctaggaatgtagtttgaattttaaaatgagtgataaaggaaagataaatcagtatagcaggctaataattgttttttaaatatttaagcctataaactattttttaaaagcctacctggtaggaagatgggcacaggttgtagaaacaagacagttaaaggagcacaggaattcactgaagaagatcgcagtcagtcagtaaggtgtttagcttctctagtaatcagagaaaaggcaagttaaaataatggcatgctgttttttctatcacattgggacaaatggaaacaaatgatagacccgcttttaagaagggtttgagctggaaaacaggttttgttttgttttgttttttgtttttgagatagtgtctctgttgcccaggccggaatgcagtggcrcgatcttgcctcactgcaacctccacctcctgggttcaagcaattctcttgcctcagcctcctgagtagctgggattacaggcatgcgccaccatgcctggctaatttttgttttttgtttgtttgtttgagacgaagtctcgatctgtcgcccaggcgggagtgtagtggcgtgatctccgctcattgcaaggtccgcctcccgggttcacaccattctcctgcctcagcctcccgagtagctgggactacaggcgcccgtcaccacgcccggctaatttttttgttatttttagtagagacagggtttcaccgtattagccaggatgatcttgatctcctaacctcatgatccgcccacctcagcctcccaacatgctgggattacaggcatgagctaccgtgcctggcctaatttttgtatttttattagagacggggtttcaccatgttgttcaggctggtctcaaactcctgaccttgtgatccgcccacctcagcctcccaaagtgctgggattataggcatgagccactgcgcccagccgaaaacaggtatttatgagttcctgatgtgaataaactgaaagagcctgtgtgaacgttaatagtgcacgcacatcatttgtccatttcactcacaggtatttatgctagagaaatttttagacacatggacagacagtcctacagggatacccattgcagcagcatttgtaacagggaaaaattcaaataatttaacagtccataggggaagagctaaatgaactgtggtacattcatactacaaaatagaggctgggcatggtggctcacaactgtaatcccagcactttgggaggccgaggagggtggatcacctgaggtcaggagttcgagaccagcctggccaacatggcaaaatcccgtctctattaaaaatacaaaaaattagccgggtgtggttgcgggtgcctgtaatcccagctacttgggaggctgagaggcaggagaattgcttaaacccgggaggcagaggttgcagtgagccagcattacaccattgtactccagcctgggcaacagagtgagagagtgggactctgtctcaaaaaaaaatagcctacagcagttaaaggaaaaaagtagcttcaaacatattgacatggtaagttcaagatatattgttgcgtaaataagtcgattacagaataatacagagtatgacacggaatgtaaaacacatttacatatggacaggtgtgcatatatataggtagatgcatagaacaagttctaaaaggatacactccaaaacagaacagttgagggggaggagagtggtactggtagaattttatgttgtttgaattttgccaatcagaatgtattcgtggttttttttttccttttttttctttttgagagggagtctcactgtgtcgcccaggctggagtgcagtggcgtgatcttggctcaccacaacctccacctcccagattcaagcgattctcctgcctcagcctcccaggtagctgggactagaggcatgcgccaccacgcctggctaatctttgtgtttttagtagagacgaggttttgccacgttggccaggctggtctcggactcctgacctcaggtgatccacccgccttggcctcccgaagtgttgggattacaggcatgagccagtacacctggcctgtattcctgtatttttatgtaactaagaccatatcaagattgataagtaaatgaaaagtcagactattccccgtgcccacaccaggcaagtaaaccacctgttttgtttcctcagggatttttgccaagcctgaccatgttaagatgacatatccaaagactcagcttcagcattcactgcctttattattgatttgtgacaatctccgtgaccctgggaacctggggacaattctgagatctgcagctggggcaggctgcagcaaagtgttactcaccaaaggtaaggacatcaaaggccaggcatagtggctcacactcgtaatccagccctttgggaggccgaggcaggagggtcacttgagcccaggagttcaggaccatcctgggcaacatagtgagacctcatctctacaaaaaaaactacaattagytgggtgtggtggggtgtgcctgtactcagtcccagcaacttgggaggctgaggtgggaggattgcttgagcctgggatgtcaaagctcatcacatgtcaagtgagctcatcactgcactccagcctgggcgacagagtgagactccctctcaaaaaaataataaaccaggtggattagttggtctggtctttttttttttttttttttttattaaagagatggggtctcactatgttgcccaggctggtgttgaactggctctgactcaagcagtcctcctgcctcagtctcccaaagtgctggaattataggcatgaacaactatgcccagccaagtcaatcactgttaggtgagctatggctctgggcaggcagacatgcattggatcttgggtctgccttcactagctgtggtccctgagcagtagctggaatgacaggcatgaataaccacgcccagccaagtcgaccattgttaggtgagctagggctctgggcaggcagacacggctttggatgggtctgccttcactagctgtggtccctgagcagtagtccctgaagtgtcagcttcctcgttggtgaactgggaggaataacagaatctccctggtcactgtgaggattaagtgagatgatgcacagaagttacttcataccttacctgcctcacgagtaattcagtcaatgttgattctcttttttaaaaattatgttttttgtagagacggggtcttgctgtgttgcccaggctaatctggaactcctaagctcaagggatcctcctgcctcggcctgtcaaagtgctgagattataggcattagccgccatacccagccatgtttattatcttttaaaattatcatgaaacctgctaggctgttagagaacttcacatcgattatggaaaagaaatagatgccaattttaacacttggtttctggttctttatgtaatgatattgagttcccaaattgctgagtatatgagccaytcctgagtcttgacttctgaatcctatgaaaggaatgacgtcagcagctctgaatcctaatgtcattgtgatccgtttcccttagattcccttagcctcagcgtgggtcacatgccccgcacacaaattcgcctcattacatttctgtctcttctcatcagaaatagggattaataggcttggctctaaacagactttcctcacagttggagcacgcctaaaatgtctcttacaccttgggaggtggaggggacagagagtaccattcatcagaaacaccccagccaccattaaaagtaaactaatagtggcacccgttgttgagacttgcctaaattgctgctcgcagctctttctcagtcacgccttgctagaatacgtttctgtgccagtgtgagagctacgtgctggggttctgtgatcagtacccgcttactcgccccattatttagtgctctgatagctgttgtgggatttggaaataaatctaaataatccaagcattgtggttttcacattgatactgatggctggggtgtaagaaatagggaaagaaggtaggaaatacttggtgtggtgcccagtatccaggacatgaggatgacgggaggagtctcgcctttcccctttcccttctcccctccaggcagaggggtcagcctcggccgctcctctcacacgcctgggcctatctctggtttcctgcagggagagggaaagcccgtggctgggggtgcaggcgctgttacatcctctgtgtcttattctccgtttaaaatctggtttgcctggttcgtctatcccgaggtttgacaaatgaacttctaaaataaytcgtcaggagaagacttgcgctaacaagctgtgcgggggagggtgggaggccatgcagtcaytgcgaggccccaccctcggccactctcccagcccgcccgtggtgaggagccgcccctgggaaaggccaggcgtcgcaggctgctgccggggttgcctcttgcctcattgcctcatctctagagtgttccctgctccggtgcagactgaacgttgaagcccaatgggtcttgatgaaactatagatctgattctgtcactgctttgcttaagatccctcaatggcatgatactgtcttctgataaaatgccaaactcctcagcttcccataggaggcctcctccgtgttggcctgcccacctcccacctcctgtgccactacagccccagcgctgattgaccggctcactgcctgtgccaccacacccccacccgctgattggctggctcacctcctgtgccgccacagcgccaccgctgattggccggctcaccccctgtgccgccacagcaccaccagtgattggcaggctcacctgtgccaccacacccccacccgctgattggccagctcacctcctgtgccaccacacccccccacccgctgattggccacctcaactgtgccaccacacccccaccggctgattggctggctcacctcctgtgccgccacagcgccaccgctgattggccggctcaccccctgtgccgccacagcaccaccagtgattggcaggctcacctgtgccaccacacccccacccgctgattggccagctcacctcctgtgccaccacaccccccccccacccgctgattggccacctcaactgtgccaccacacccccaccggctgattggctggctcacctcctgtgccgccacagcgccaccgctgattggccggctcaccatgcttgcagtccttaggctgcgccactctcccgcttcctctcctagctctgtcctctgcctgggcctttatctcagtgtggtggtcttttagatggttttcctcatcgccctgctttgtccgtgggttttctatgactgtgtgggtgcttcttttacatcagttactgatactgtagccatctgtttaataccaccccactacactgtgcgttccttggggttggggactttcattatctttgcatcttctgcgcagtgtctggcacgtgtgaatgggagatgttgaagggatgcataaaatatcttcagcactagcaggagtgactcctatagtcgctgtgctggatgctgtcagagagaggcagaaggtcccatccctcaagaaagctatcatagaagaactggtttatctcctgatccaaaattgatcagacttactccacagtcccctggtctgggaagatttgtaacatcttgattgtttcctttttattttccaggctgtgtggatgcctgggagcccaaagtgctccgggcgggtatgggcgcacatttccggatgcccattatcaayaatctggaatgggaaaccgtgcccaattacctgccccctgacactcgggtctatgtggctgacaactgtggcctttatgcccaggctgagatgtctaataaagctagtgaccatggctgggtgtgtgatcaacgagtgatgaagtttcacaagtatgaggaagaggaagatgtasaaaccggagccagtcaagattggctgcctcatgttgaggttcagagttacgactcggactggacagaggcgccggcagctgtggtgattggcggggagacctacggcgtgagcctggagtccctgcagctggccgagagcactggtggcaagaggctgctgatccccgttgtgcctggtgtggacagcctcaactcggccatggcggcaagcatcctgcttttcgaagggaaaagacagctgcgggggagggcggaggacttgagcagggacaggagttaccactgaggacgcagaagtgacttctgcttgaggacgtctgcagctcctcctacaccagcacactggtgggaggctggcggagtcagtgactatggcccccacgttcaggaggaaggtgtgatgccgtcatacagttacaggaaaaataagaacttcctcagaaagaacaggtccgaattcttcctgtcgcgtcactgattttgaggttcttttttctcttggtgacaataggtgacccacgtggctctgtgtgtttttaaaaattgtccaccaagaagcactttgtgcccagaaagttcctgaagcatcatcctggcagggaggcgcctgctccaccagctggtgggtgtttgtaatcgccaagcaccagctataggtcacagccacatcactcacagctgatcactggttggtggaaaataaactatgagcagcagattacgttagtaagttgttttgtgtcgttggtgtgtcacagtacctgtcacgtttggcctggtaacgaggacgtggctaagggaacaccaggaagctgagggctacgctcatggcatccagcagctctgctctgggctcagatggtctgtctttgagattgttcagggcttcactgagccactgtttatgtatccatagaaacggcttaattcaacaggccatgtcagaccttcttggcacctctgcagatacctttttgaggactttgcagagacggaagtctatgcggaaaactgaatttcaaaatcggcagcctcaccctgcatgtgtcaggaaagtgtcactgtttcctggttccctgtgttagtcctacttacgtctcatcccccaatgtttagaggccaaggttctgagaatgaacgcccacaatacagcggcaggacccttctgttctctcagcccctccagggcccagggcaagctggatctttacctactagcggccaaaccaggatgtagccagggtgtcagggcaagtgctgatggtcatcaatgtatctataaggaactgtggggatggggtgggtgggtggaatatgggactcttaagcactgctggccaggtgcggtggctcacgcctgtaatcccagcacctcgggaggccgggcgcagtggctcacgcctgtaatcccagcacctcgggaggccgggcacagtggctcacgcctgtaatcccagcactttgggaggccaaggcggcggatcacaaggtcaggagatcgagaccgtcctggctaacacggtgaaatcctgtcttcactaaaaaaatacacaaaattagccaggcgtggtggcaggtgctactcgggaggctgaggcaggagaatggcgtgaacccgggaggcggagcttgcagtgagccgagatcgcgccactgcacgccagcctgggcgacagagcgagactccgtctcaaaaaaaaaaaaaaaaagcactgcttttgcagccacacagagttggagttgaagacaacacaggaagcgtttccccacacccctctgcccagcggctcccgtaatggtttggacactgctcactccagggaggtcaagtgtgttgctggtgtgcccaggagaaaccttctttctcttctactcccccaacttcctagtcaaactccctcttcctagtaaaaccaaatgaccaagcatgattcacgtgccaaggggcaggttgggattgctctcccctgggggaggggtgtttgcagggacagtgtcctcccaggctgacatctgaatatttgaacatctgctctggagccccactgtggtctgggcctgcccagagctccacatgaatgggcaatgcaagtgtccccccaacactgctcccaaaggctggtgcagagaggacaggcggaaaggcggcctggagaatgcaaatccatcccactccagtctccccagacacctcaggacagtgctcaagcagcaggagtcacgaaaaggaagctcacatctttccagcctaaaaccaatctcgtgggatttgttccccgggttatactcccactgactcgttacaaaataacagtgaaagaataaaccatgtattaccttgtccttgtttagaaaaagcaatgtaaacactggaaagtaatttttttttttttttttgagacggaatctcactctgtcgcccaggctggagtgcagtggcgcgatctcggctcactgcaagctctgcctcccgggttcccgccattctcctgcctcagcctcccgagtagcacctgccaccaagcctggctaattttgtgtgtttttttagtgaagaaaggatttcaccgtgttagccaggacggtctcgatctcctgaccttgtgatccgccgccttggcctcccaaagtgctgggattacaggcgtgagccactgcgcccggctaattttttgtatttttagtagagacggggtttcaccatgttagccaggatggtcttgatctcctgacctcgtgatccacccgcctcggcctcccaaagtgctgggattacaggcgtgagccacagtgcccggccaacactgacaagtaattctaagcccattttatcctgggtgtgagagggaaaagaaatttacatccctttgctttagagtccgtggcttatatgccacggtgccttcagttcactttatatattcatgggtataatttagtagggacgagggagggtgcaggagggaggcaaattgtcctttcttcagtgaatacaggggaacagatggttgttatttgctgagtgattctggaaaatcactaccttgaattctcagttttgagtctgacatttgttctgtcaccatttccccagtaaacaggaataaaaaacgagccacatttgacaaggaaaacactgcttggccgagagacgaacattgtcaggatgttggccacgctcccgcgcctttgtgtggtggcgtasstgtcacagtggcgtctgccaggaggtggcaggcgacacctccaaaaccaccccagtgctgaagggcggggctgcgattttttcctggatttaaatcgttgaaaagggaggaaaagaggatggagtgaagtctccctccaccagagagcattttgcaagctgtctgtgctccggggtgttaaagccggagacccatccagattgtcccagaccacctcagaagaaagaacccggagtacaggaagacatgggaacaaaaacggaggcgaaagaggacgaacgggaaatagcaggaaagaccgtcacaacttttccctgtgactgcagcctctgagaaaagcaactctgggcaaagcataggtgtccagatgtgcctggagctcacgctgggtgcccaccggctggcccttcggttcctgcttcggggcagagagcgctgaaatcactctcccctcgccccagccgctggctcctggctgggagcctggtcattaaggtccagaggagaaacagacctctggggacctgccgttcacctgggaccttccgctgcttgccccggggttgacagcaaccccagatgtccgcaccagccacgctgggccacacttagccccacttttgccattctaccacgcacagccctcacacacactccccatccaaggttccagggctctgggctgaaaatcaccagctgtactgcagggcctggggctgccctcttgaccaagctacctctccctcaggagcagagctgacaggctcacctgtttttaagaaaacatgttgccaccttaaaaattccatgattgtgtttcctctgttttctttttttttttttagatggggttttgccacgttgcctaggctagtcttgaactcccggcctcaagctatcctcctgcttcagcctcgaaagtgctgggatgccaggcgtgagcccctgcgcccgccatgtttcctgttttcatcagtgcagggagtgcacacatgtaataagctaggagccaagttagtggatgagctggtttattgctcaggatgactgaagtctcaactacggaaccatgttacattcgagcagctgagacagcagctgaagccaggtcctcccgaagcttcaggaagcctgcttgatgctccacggctgagagtgacagagaatccagaatagcttatggatgggtcagttctcgtctcaccacactcccaatatccagcttcctggactgttgtgtagggaagagccacttttttcagttgaagtctgagttcttatgggccatgaccaaggctgctgcttcctcaaaaggcacgaagggggccgcgtgyggtggctcacgcctgtaatcccagcactttgggaggccaaggcgggcggatcacgaggtcaggagtttgagatcagcctggcaaacatggcgacaccctgtctctactaaaaatacaaacattagcccggcgtggtggcgtgygcctgtagtcccagctacttgggaggctgagacaggagacttgcttgaatgtgggaggcggaggttgcagtgagtcagatcgtgccactgcactccagcctgggtgacaaragtgaaactcttgtctttaaaaaaaaaaaaaagaaatgcaggaagggaacagggaacaaggctggggagggaggagccgacggctgcagcaagctccggcctcagcctcccttccctgctcctctgagatgccgagggcggggcgtactcactgcaagcctgccaagtaggacctccatgtcctctgacattcgagagatggactttttggccctgagatcacgtctcctactgtgtcgtcattctagcacctgtgggtgacttcctcatgtgagtgaggcataagcacccggaatccggactggaggccgtctctgcctctggattgcacactggcctacagacctggggacagagtctttcacgagttgtgtatcgtttaacagaaacccaacagttccacccaaacctcctgacacattctcgggcttgggaagtgtcccaaagcaccaagggggtgagacacacgccttgaaaaatggcagtaggcatacttacctgtcttcatgcgctcacatacgaggtgtacctagaacgccctcatgttatattcccagcactaatgaagctactggtcaacagctatttgttcccaaagaattttcccttgcgcagccgcagcctggaggaagcagggcgtgtgccctcgtctgctggcggcagcagtgaggggtgtagccaagtgcccacttctctcattcagctgcttcggggcaaactggaaagatcctttgagctcacagccccctgctcagtgctactcctgaacctgcgggcctgtgtgcacagccacccacagcgcgcacaacacatgggcctgcccagggcaacggcaccgtcaacagcgtgtgccctcgctcagggccctscyggtactacscttcccagtgtgcagggttcccagacgtgtgtcctctcatacattgcatttcctccctaagctgcacggggcaacaccgtgttaggtcccgcgcatctgctcctgggccacatccggctccgtctgtattgttcctgaattcagtttgctgtcctagaacaaggcagcaggaggggagaacagcttttcagtgtctttaattaggcaacaggaaaaaacaaagtctggctgaaaattactatttgaagcttggccgatgccaacacagcactcgctccctgcgttctggtaagtgatggccattgatttcaaggacgtaccaaggggcgaaaagcaagagcaggaagtcacctcgctctggaaaagaagctggttttcatctgctgtatgtgctggtcccaaacatacccttttctctttttttagtattttttttcccaattaggaattcaatgtggaaaacataccctttttcttcaacaggcttttaatgttgggaagacaggttaaaaaaaacaacaacaacaggctggctgtgccggcgcacgcctggaatcccagcactgtgggaggccaaggcaggcagatcacctgaggtcaggagttcgagaccagcctggccaacatggcgaaaccccgtctctactaaaaatacaaaaattagtcaggcgcggtggtgtcgcttgtaatctcagctacttgggagactgaggcaggagaatggcttgaacctgtgagctgggatcgtgccactgcactctagccggggcgacagagcgagactctgtctcaaaaaaaaaaaaaaaaaaaaaccctcatcgctgttgtgaggatgaatggatgggatctggaagtcactgtggtaaacacaaatctgggaaccacagagtggcgttttcacagccgcccccagcctccacctgcagggcctggttttcctggctgccggaggaagcccttgaatatgccacagctggtgctgaacctgcttccaattagcaacaagaatctgaaggtggagctgcttggcggggattatcatgccacccacttcg

SEQ ID NO: 95557 - DNA, 142944 bp, Homo sapiens
agtatctttgattcagcaattccacctcctgtggattgccatatgttagggtattcattgcaggtacataacagcacttttcctcccagcccccatgcaacttaaccatccatccacaggaaaagaaatgatggaaaagatacaagggaaactttgcagccattagcatgaatgaggctggtcaaaaggactgaaaaggaaaattttcaagatccagtattaacaaatctggaaaaaaaatgcagtattatgtgaaaaaaagcagctcatagaacaatatgcccagtatgaaccattttatttttaaaaatctgtttttttttgtgtgtgtttttttttttttgagatagagtcttgctctgccacccaggctgtagtgcactggggcgatcttggctcattgcaacctctgcctcccaggttcaatagattctcctgcctcggcctcccgagtagttgggattacaggcacccaccaccacacctggataacttttgtatgtttaatagagacggggtttcgccatgttggtcaggctggtctcaaattcccgacctcaagtgatccgcccgcctcggcctcccaaagtgctgggattacaggaatgagccaccatgcccggccccaaaatctgtttttatctaaacacagatcattagcagcagttatctatgagcataggaggattggggtaggaaggtaaaggagaacttttaaaataaacatatatatatgttttttacttaaattttttaaaaatataatcacatgttcatgtattattgtgggacaaaaccaaagagaaaaaaattccttacgtacaaatctttgaagtaaaattacaaaataagacctagatttaagaagtgaagtccgggcgtggtggctcagcttgtaatcccagcactttgagaggctgaggcgggcggatcacctgaggtcgggagtctgagaccagcctggtcaacatggtgaaaccccgtctctactaaaaatacaaaaaatcagccaggcatggtggtgtgtgcctgtagtcccagctactcgggaagctgaggtcggagaatggcttgaacctgggaggcggaggttgcagtgagccgagatcgcaccacagcactccagcctgggtgacagagcgagaccctgtccccccctcaaaaaaagaaaaagagaagcgaatagtgaggagggtgaatagagaggaggcagcattcagtagcaccggtggaagcatttagccaagacagcatgaacttgtggagtattgtttcccatttctcccatattattaaattcaactctagagacatactgactacctgacagtatgtagaatgcatgtcagcatctttctttttcttttttttcttttttcttttttttttttgacacagaatctcgctggagtgcaatggcgcgatctctgctcactccaacctctgcctcccgggttcaagcgattctcctgtctcggcctcccgagtagctgggactacagtcacgtgccaccacgccccgctaatttatcagcgtcttttaaaagtaacgcaagctgggcgtggtggctcatgagatcgtgccactgcactccagcctgagggacagagtaagactccatctcaaaaaaaaaaaaaaaaaaaaggtaattcttgaggaagatttgggtatcattcagtcccttgaggctcagacctctgtggctttcaggtaaaggcatcttcagtcatactctgaacacaagacttaaaataaccagaattctcatcgtcccctacccctgccccctggcatttcattattattatttattttatttacagtcatgtaccacaaagcaatgttttattcaacagaccacatacaggacagtggtcccataaggttttaataccatatttttgctgtaacttttctatgtttagatgatgtttagatacatgaatacttaccagttacagtcacctacagtattcagtatagtaacatgctgtacctgtttgtagcctaggagaaattggctctaccatacagcctaggtatgtagtagaccataccatctaggtttgtgtaagtacactctacaatatttgtacaatgatgaaataacctaatgacacatttcttagaagcatccccatcgttaagtgatgcatgattgtagttattttttaaagcaggagtgtatataaccaaaaaacaaatcaaccgcagaaatattgttttaaaaacctacaatattacggtgtggtctgagatccaaaggcgttcatccaagtttctgacattttacacaactatacaggttatttaatttcagaagcccacctgcaaggcaggatccctttagatcctgctcttgtcaatgaagaatgatgccagcccctcagtactcgagccacgtgtggttctgtatcctgggtttccaaaccaaactcatttagtgacctagggtaactgccatgacctctcaaatgagaataccacggaacagggcatgagtatgaagcccctagcatgtctagtatttgctggtagctcaacaaacattcattccttccatttttatggttctaaaagattttcatcttaaggggcatgaacatggcagacttcagattaatgttgggattgccaggatagccaatgaaacaaaaccaactctttttttgtttgtttgtttgtttgagacggagtcttgctctgtggcccaggatggagggcagtggcgtgatcttggctcactgcaacctccgcttcccaggttggagcaattctcctgcctcagcctcccaagtagctgggattacaggcacgtgtcaccacgcccagcttatttttgtatttttaatagagacagggtttccccatgttgaccaggctggtcttgaactcctgacctcaggtgatctgcccgcctcagcctcccaaagtgcggggattacagatgtgagccaccacgcccggccaaaaccaactctttttatatatgaaagtgaagacttcagtgtgtgcccgttttcccatatgactgccacctaagccctctagttttatggaaatttaacctcttatggaacgtaccatatttatcaaatttaactttttatgaaattaaccaacttatggaaattgactttgtacaacttatttatcttcacataattaaaattgtaattcacggattctgaaacttacattatttgaaattcatatcacgtctctatcaaccagttgctactgattttagcgtaagatttcacattttcagaatatgctctatctggaatatacatataagaaaatgttccgccgggcgcggtggctcatgcctgtaatcccagcactttgggaggccgaggagggcggatcacaaggtaggagatcgaaactatcctggctaacacggtgaaacctcgtctctactaaaaatacaaaaaattagccgggcgtggtggcaggcgcctgtagtcccagctacttgggaggctgaggcaggagaatggcgtgaacccgggaggcggagcttgcagtgagccgagatcgcgccactgcactccagtctgggcgacagagcgagacttcgtctcaaaaaaaagaaaagaaaagaaaaaaaaagaaaatgttccacagttgttttcatttcagggtaaatttacctaggaaagataggaatattttagagaatccctccttttttttttttttttccttttcattgtgctgccataatgttgagaatcaaccagacgcatctgttccctaagcgccacagttcaggaaaagacaagccagatcctagagagttttggttcccaccccagcctggccactgccactcatctgggtccccgtgtcctcactgtgaaaggatagccttggaccaaatattgtctaaggagctttcaagctctaaaattctatgatgagtcgtcaagcaatgaacaacaaactaaccagggaagcaaactaaaatacatttcctgtggccaaattctcagagcccaggagtcaacttatcaaagagggggaggagtcaaacagttcaagagcagtgccacacacacaaaacaagtatcagctaggaaacagcacttttctgcctctatctaaacatgacctaaaaacaaaatataaatagggtttaaaactttaatgtgtatactcagcacacagacttcctattcacaagaagggaagatactttcgcgtaattacaaagtgtagtcctatactttgtctgttcctactatacaaagcataaaattatatacttgcaaagtatgaaaatatttaaatggtataattatctgtatttatgacacttttttttttttttttctgagacggagtctagctctgtcacccaggctggagtgcaatggcacgatctcggctcactgcaacctctgcctcctgacatttaaacaaattactctcaaaagatcataatgtcatggaggtagtttctctgtacttccagggagccacacggaccactctcctgtaatatctattcaaaacaagacccactcatttaaaatccctggtagtctgggaaactgggtggctttccaatgctgagcccctaggccggtctgaaaggtctcctcctcctcctccaggtcaaaacaaaggactgtgaccctaccgtttctgctctctaaaacttacttgcgcagcgccgcacagcctcccacgtctctagcttctttgctgcccctacagacagacatgtagatcattttaaatttaaggccttcactgatttccttaggggaaacagaggaagagtgaacaggagaaccaaccttaagaaaaagtgcttacagagttgctgatctctagcttcagacacagcccccctacttccttatttagccgtgcttaaggtaaaagcccacaacaatagaagtcaaagagccccttcctgaggtgctctatgaaaatttgcatttctgagaggcttccaaggggactgactcaaattcatctttcttttccccaggctggcagttaactgcggaactgcaggataaaacgttcaagtgctggtgaaaaatagggacagcttgcagatgttgtaaaatttggggccgtgaaatcttaacactgccctccaatcttctcacccttttagatgctaccatggacgtttgtttaaaggccctccaaaatgacagtttttggttaagttccaggaagatagggcattattttaatccagtagaaaaagaagaggatatgaccctacagtgtgccagataaagaagtttaaggacaaaacttgccccttgcttcaatacttcatgatataatcggacctgtcgacacctcagtatacacagcaatgagtgtataaacttactgaattaatgtgggcgctggattccgagatgagaaactctgaggtgcaaacaaccacggtatattgtggttccacggaagtttcatcgggtccttaagaagcccttgcttggcctgtttgaatgctgggcataggtcgataaatagagcgtagttgtttaaatagttttacttaagttctgaaatcaactctactttaaatctatatagctgcaggtaatgtaatcaggccatcctcttccaagctggcagccatggcaaaagtccctttctcttggcgcgaattacaaggaaattcaagaaatactttaagatatatatatgccaaagacctggagttaagttactagggtggggctgtgtaaatgtttggtgactcactaaagaaagttgggatctggggtgctggcacctggaggacacagaagaaacaaaagttggggggctggcgaaggtcgctagcacactttatctctgattggcggaagccctcagagttttctttatggcgtcaccgagtacctgcctgtagaaaggccccgtctccgtgacgtcacgccgcattggccaatgaaaggcctcagtctgcgggccccgaggagggttgtgggcccttttttgtgaatgaagcgccacggaacagccctcctggggtccccacgagccgcgtcctgctgtgccccggcgcctacgcagcagcggccgcggccgcggtgggcacgcacggttaccccgggcagctccggccgccagctgcagccccgtcgcctcggccgcgccagccggctgcgggcacctgggggcgggctgggggcgccggccgcggcaggaggcgctgtagcgagggctgcggcgccggtcctgcggcggccgcgggaggcagcggggcaggcgctgtgggccgggctcctcctccggctcctgcgcgaccgcctcccgccgggctctgccggcgcccgccgtccccgcagcgccgctctgcgcccgccgccccgagcgcccgcgcggggctggcgggagcctcggcgggcgcgcgggcgcgcggggccatggtcgtggccccctgacgggccgcggccgcctccatgaagcggaaaagcgagcggcggtcgagctgggccgccgcgcccccctgctcgcggcgctgctcgtcgacctcgccgggtgtgaagaagatccgcagctccacgcagcaagacccgcgccgccgggacccccaggacgacgtgtacctggacatcaccggtgagccggccagtgggcgcgcggagggccccggacggccgcacccggcgcggggccctggcccacctcccaccgggctgcccggggcctccggggccgggccgaaatgccttcgcccccacccccttaaacgccccggccgccacaccccctttaggagcctggctcctgaggagcgccccccgccccgagtttctagctgcgtgggctgcgagctttaactttagcttgtgcaccctcctccaccagcaagatggaccgagggtcacctttctaagttgcgggcgtcagcccggcgcctcgaacctgcagctcctccccgcgggctgcttctgagttcctgtggattccgccttcagggattgcgagcccggttggccctcgcgcgagtcacaacctctgaatcagcccctgaggattccccgagcgcgctgaacgcgcctggcacgggagctgcccctttttggcgttggccaaacccccgctgctccgtagccttgggaccctgggcgccgcgttgcccgtccggcgcgtaagcccgagcccctctcctgggcctcccgcgccctgccccctagcgcgccccccgaacgcctccgcctcccggggtccgctccccgccggggcctcgagaaggaaggtgtcacgttggtggcattcgagccagccggcaagacgaatgtccgggttgtcacttttgagaaatcccagccagccagagcaggtagccaagcagcccttcgatagctgttctgttagtgctgattcgactgttcttggagactcataaatccaatttggcagctgttaggtttgctgggattgacagtgacgcgtgtgaaggcattaaatgtgatgatgtatgtggcaacgctgtgtaaacagcagagctgtccacgattttgagggaattggcagtctgttttcagtggcggggaatgtgtcaacctcggtgcgtggcgttattaaaaactgtttccagcccctagcctttgataaaccaggtaagctggagtggcgagaacattaagtggaagtgtttagacaaacacagacgtttaggagaaataatattctaggttcatggacaatctggaaactaagttcgttttgaaatgaagctgagagcagagcgggtttctcggctttggtggatggcccttgggaaccagagcgggcataggaaggggttgccctgagtaccagtccccggccggtagctgcggggggtgtgcgggaggtgaagcctgctgagactgagaagccaastcccgctaacgttgtgcccttcccaggagagggcctcgccgaggacggatggggctgggaacgggtgggcctatacatagtttctgcccgttattgtttatacctcttgaaaggatctgtgttgaatgggatttaattttaggacaagtaatgcatttacatggtacagaactccaattctaaaggtgcacaggagtacgtgcagaaaagttggtctcacagtctccaagtgtccttctctagaggcaactactcttcccagtttcttgtgaagccttctagaaataggctgtgcatgcatactatatatactatatattctctaccatacacgtgcgagtagcacacatgttgttttgcacatttttccgttttcatagtgtttcttattagaatgattgttctgagttggtgcatataagactggcttacttgattttaattactgcttaggccaatgtacatacggttttatgaataaaaccattaacaagtacgtatggatttaaatgtttatgtagatttgaatgttttttaacctatttagacagtccctgttgatgaacatttgggttttcaatcagaaggtttgtgacagcaaagtcattggaataaatctttcttcttgatggagatgaaatatgtggctagtcttcgtgaggcagtcaccaattaatcaacttcagaaaaatagaaccaagcagaatactgaggaggggtgcgttacaggaaataaaaatgctatcagagggcaacccgctctggtccccttccacgctgcggaagctttgttcttttgctcttcacaataaatcttgctgctgctaaaaaaaaaaaaaaatcctatcagattgcaagccctaataacggaagggtccagctttaatgtaagggagctccaggggagtaaaggttatagtcacctttccctgtgacttctctaggtgtccctcagtgatagtcttggcttcctggaaaaatgatacttaatcagtctgttgcagtgtgatatacaaggccaattaaagtatcttcagatacagagttcagattactttttattgggcttttgggggaaggcttgaggcctgtcctcagcaagtggcaarctggtcccttccttctcaacgtgtttttccctccattattgttttcttaatttaaaaagcagtgcatgcacacttctaaaaagtcaaacattatcaaatgagtttttttttttttttgagacagagtctcgctctgttgcccaggctggtgtgcagtggctcaatctcggctcactgcaacctctgcctcccgggttcaagggattctcctgcctcagcctcccaagtagctgggaatacaggcgcccgccaccatgcctggctaatttttgtatttttagtagagacagtgtttcaccatgttgtccaggctagtctcaaactcctgaccttgtgatccgcccgccttggtctcccaaggtgctgggattacaggcgtgagccttcacccagcctatcaaatgagttttatggagtcttcctcccttggtaatgtttttcctccttcaattttctgtgcacattcaagtttctggaaattgtgccataccagcaagattagttctctttttttttgagacggagtcttgctctgttgcccgggttgagtgcggtggagctatctcggctcaccacaacctctgcctcccgggttcaagcaattctcctgcctcagcttcctgagtagttggaactacaggcatacgccaccatgcccggctaatttttgtaattttagtagagatggggtttcactatgttggccaggctggtctggaactcctgacttcgtgatcccccccagcctagatctcccaaagtgctggggttacaggcgtgagccaccgcccgcagctgattagttatcttttgatggctgcattatatggccaaatcatgatttatttagtagtaataaatagctggttatttgggggttttccagtccctattgcaaatggctgcagtagcatcaatgtatgtgtctgtttatatgtgtgactatatctatagagtgtatttctagaggtgaaaacgccaggccagagtacatatggactttatccattcctcagtggactttttggctattaggaataatgctgctgtgaacattcatatacaggttgttgcatggacatgttttcagtataacacccaggagtagaatggcaggatcacatggtatctccacgtttaatgttttaaggaactgtcagactctttttccgaatggctacgccgccagcgttcccacaagcaatgcaccaattattccacatccttgccagcacttaatattggattgacaagattctttcacagtggagtaggtttgtaaaaattaatgcatattgtcacttctgtccaccctgcccttaaatacatcattttttaacttagtcccttgacatttttattgcagcctatttaatctgtaaattgaattcccatagatcccaggatacttcgtgtgtgtgtatttaatataggatgcttaatccctatttttgttcctgtcatcatttgttatataatcactattgtttagtatctagccacccacaccactatactgggcatttactcttactaggagcagactaaggggtttaactctcattccaaccccatccacctctcacggagccattcattcacctcttgccatgtgcaatgacacggatttttttacttgaactatactgctagttcagtttcagtccaccatgaaaacaaaaggtcataaagacagtgtaggccgggcacagtgtctcacgtctgtaatcccagcacttggggaggctgaggtgggtggataacctgaggtcaggagttcgagcccagcctggccaacatggtgaaaccccttctctactaaaaattcaaaaattaactgggcatggtggcacgtgcctatagtcccagctacttgggaggctgaggcagaagaatctcttgaaccagggagatggaagttgcagtgagctgagattgcgccactgcattccagcctgggtgacagagtgagactccacctcaaaaaacaaaacaaaacaggcggtgtaaactgtaagcattaaagctaaaaagatgctgggtacagatcagaatgagctgttactagtctaggaaactggaggaagtggggaggttgaggagggttttcaaggaaaaaatactagatttttctatgaacctccttaatgtcagaggtctgaatctttatctctattttcccatcccttaaatagggacctccattcatggcagtgtactttctcctttcctcaggaaaaaaaaatttaaagactctaacactactgcatatatctatgtttgataatttataagatgtaatagttgttgcagagctttgatttattttactatttttatttttaaaatttctgattaggctgggagcagtgactcatgcctgtaatctcagcactttgggaggccaaggcgggcagatcgcttgagcccaggagttcaagaccagcctggccaatatggcaaaacccctactccggaggctgaggtgggagaatcacttgagcctgggagttcaaggctgcaatgagctgtgttcattccacagcactctagcctgggcaaaagagacatagtgaaactccgtctcaaaaaaaaaaagaaagaaaagaaaaattctgattagtaaagaatattggtaatagctactggctaaaagattcttggtggtttgtgttaaatttctttacctttttaaaaacaagttttcgagtgtctgccatgatctaacttttaaagactgtctgtattataatagtaaataattttattggaaaaacactaattgaggtcaggattgccattttaaagcactaattaatggtgatatattggatactcatcaaataaacaaatacagcattgtctcctccctccttcctttttaagatctttaaaattcacagcagacattagacagggaaaatttattcattaattcaagaagtatttattgcatgcttactatgtaaaatagtcatgcatattcattgcagtgatggaagtatatttttcttgatagaaaaggaatgctgttatgtagaacactgagtcaaggaaaaaaattgctttttcttcaagagttttgtgttatagtagattatccagtttcaggaattgaagcccatcatagtgtgtagtgtgcatttttcttcttgcctatgtcttggttctcctttacttacacttaaatttgtctgtaatgtgaatttgttttcttgatttctatgcttgcttaattcttcaacatcttcacttctgatattcatgttagttatctgctttaaatctaattcctcaggcactccaacaccacgtggaggcaacagtttgacagtttcaaatgtcactccttaagtggacatacagagtagttgggcacagacatgaatggaaggtggaataattgtgttgcagaaatggtactgatgccagggagttgccagtcagtgcaaattgtaattgctctgtgcttttgaatgggaaggaatgttcccagtttctgctggggttaggaagagctggactgaaaccacactgtggatttttaggatggaagaaaggcattgatgcacacaagtgacatttcttggaaatttctgagatagtctgtgggaatcactgaattgataggacaggggaaagaatttcaagagatcaaaaccctccacattcccctgtgaagaagccaaagggccagagataaaattgggccacaatgatgtagtttctttttggcaaagccatgactacctgacttttactgttgccagcagataaagctgcttcacagagttgtacataaatgatttattggatatctcctagttagtcctgtgctacttaggctaggagatgaataattacctactgaatttgaggaaaatgagcaaaacaagtacatcattcaggtcttctgcaggtcatgctgttttccaaattgactgtcattaacagccccagttttccggatattttattcattcaacaaatgcataatgaatatgtgcaaatgaatacctactctgccaagctttcttcccctcaagtgctaaaaatagagcactgctagagatagtccctgctctcatggagtttatgttttcagtgttaattgagaaaataacactgggagggtctgagggagaactagcatatagagtaaccatatcgcatattgcggttgaaatctttagggaagaaaaactttaatcaaagagtttttgaagagccaattctatgaggccagctaagctagccactaggcatgaggacactggggaaacctagtctctgccccatcccagggttgagcacagacagattattagtaaccttttggagcctcgatgctttcatctgccacagatttgttgtgagaatgaaatgaaggggatgcatatgaagtgcctggcttgatgcccattgatggccagggctgcatcagtgttctcttgtgtcacacgcgtgacagcagctgcgaggacaaagggcaggctgaggcacagtcatcacggctggaagggtttcaagctaagaagcaaacattcccgtgtacttgcacaaaaggttcagtgaatcagcacagtggaaatgcagtgtgttcctctgtctgcttctgagagcgagctcagggcagaaatgctccagatgaggctggctctgtatttgtcagagcagcggaggaggtttggtgccgtggtgatcatcttttctgccttgggataaatgttagagtttctctttagaaagattccctgtaaaaggaggaataaaccaaagctgttacttcattcttgaggctattgttatgtatttttattatactgaagacttatattgcctaatattaaattgcagctaagcttattgttggggaggtcttcttaaagatgggagacccctctaccatgggagagcctgaggtagaaaataaaacaatatatgaaattatttactgatagaatataaattttcagagtggttaatttaaaaaatgctcttgtatatgttttaaaatagtgtttcacagacgattatccaaaagatttgaaactaatggtgcatattattggcagacagggtctttttttgtttttttgtttgtaaaacaaattgctttcaaaggacctttccatgcttaatgtgtagcagagagacaagttatttggaaaggttgggaataggatataaagaagaaatgagatctttaaatctattttttattaccctgggaaaaatgaattttagtagccagtattttttgttttccttcccatcttagctactgaatatttgtataacctaagtaaatccttcacattaacattgttataaggatctgtaagttgacatgcaaacatggacagaccatctgaacatctcaaagccacgcctcatctagatcaggcatctttatgaatgaggtaagtaggtgcggagttgttgaggacaaatatggaagagattgtattagagacaaacagactggttcgcaggaactaactaatcttcaaatattgtttctttccactatttcatttttagcttccaaagtgagtcatttgatttctagtgttataagaagaattgacgtccatattaggcagggattacttttgaaaacattttccaaaattgattgtaaccttcctaaactcaaggatattgaactggaatgtgtagatctcatctggactctctagtttatatgaaagttttacgcccttttctctctctcttttttttttttctatagcttttcatggatactgctccaacaaaggtattcagatcattgactactttgcagttcttttatatgactttaaactgtagaatttaatctgttagttgtcattcttggttccgtcctttcctgtttgctggtcttaatcttaggtagcagattcagttttctgtaactgtagagcagcattggtatgtttatgacttaagttgaaatttgtctttatatgaaaggttttgttggtttctgtgatagttaatactgaaagtagtttctgcgatatttcattggattaatatgaatgccaggttttgggtggtagatattttttggtaatattcagtttttctttttaaattgaatttcactttcataggctcttgtggaaagggtactcacaatgagttgttataactataacagctactcctgtttttttttttttgtggtcatttagttctttctagacatttatttgactaatagacagatttatatcctatttactgaatttggcaagagggaaatgtcatgaaatgctaacttgggaaacagggaagtgcttctatattctttttttaatttaaaaagtattcttgccgggtgcggtggctcacgcctgtaatcccagcactttaggaggccgaggcgggtggatcacgaggtcaggagatcaagaccatcctggctaacatgctgaaaccccatcactactaaaaatacaaaaaattagccgggcgtggtggcgggcacctgtagtcccagatactcaggaggctgaggcaggagaatggcgtgaacccctgggggcagagcctgcagtgagctgagattgcgccacttcactccaccctgggtgacagagtgagactccatctcaaaaaataaataaataaataaatgaagtattcttattcacgttgactttcaaatgcctcagatacgggcagtaagcaaaaaacaaatctgaatgggtgtgtgtgtgtgtgtgtgtgtatctatatatctttccaatttaaaacaattctaactttaatctcttggtcttttatacagcttctttaatctcagcattatttatattctagaggagcagttctcttagagaatgcttcattcaccagttggctcaaaaatttggtcctattcattgtctttgagtctgaaaagctgaagaagctaggctggataaattaattctagttgcataagatcacatatcaacttcatttctcaggtagttcagttttataccattaaaatttggttggcagtgtactttttacaaaataaaaacatcttgttcctgatgtctgtgatatttattgttctttcaagttctcatttgaaagtaacwttactttcttggcactgctttgcaatttatgacattgatctttttatatccaatccataatgcaatactatcattacaaattctgaattctgcaaagccttctctcaattttaggaccatctcagctgaatcattctttgcgttttgctcatttattatctatatttatatgaatggtgctatggaattaattaatgtatccattcaacaagtatttattgagtaactacttgaattgggccaagtgttattaaagaatggaggggcaagggatgtgaagatttataacatgccccttttccctgaagactgagaaagaatacactcttaaatcatcatctgaatgaagacaggtaatgaaagaattagtcattatgtagttttgctcttttcatcatttaaatagcatcagtttgaaagaattgtgtgttggaaatgtcactcgatcattcctatacaaaatgaataatttggtctgggcgcagtggctcacgtctgtaatcccagcactttggggatgccatggcaggtggattactggaggacaggaattcaaggccagcctggtcaacatggtgataccccatctctactaaaaatacaaaattagccaggcgtgttggcatgcacctgtaatctcagctactcaggaggctgaggcaggagaatcacttgaaccagaggttgcagtgagcagagattgtgccactgcactccagcctgggtgaaagagtgagactccatctcaaaaatatatatatatgaataatttttccaatgtctggtgaaaatctgtcttgtgtgtcttttcgtgtgtgtgtgtgtgtgtgtgtgtgtgtgtgtctgtgttttaacctttaaacaacagggaatagtgtcattttggtatgtaactgatcatatataagtatatgttaataattcaccgaaaaccctatctctattaaaatacatctaaaggaaaaggtctacatttcaattagttctatatctctaatttggatctcttgctatcccagaggatataatttaaaataagatttcttgtttattctcggtaagaagtaattacagagcacctttaagctgagtattgcttcttaaattgaaggcactaaagataaagattgctaaatatttcgggaactagatttaactgtgtgacttgaactgaaaagcattctaattttccattcttttatgggtgctggggaagaactgctttgacatgaatgtataatagaattaaaatgtcggtcttaaattttggggagttgttctcagtttgctcttggaatttattattgtaatactgtcattagatagtttgttggaagcagctaatacgtgaaagtgaagcatcttaatatgcatctcttttctttctgacaatgaactgtcaaaaaagctttgagtttatctaacaaacacagctgaggctgggattttaactccactattaatatattctaattttaaactactgtaactgaaagggcatacagcactaattcaatccagacatgtttgagtgcgtttgatagtctcatccttgtaatagctgctgaaaaagatgtggtagagatttcagactggaccactgacgtctgggaattgacactagcacacagactgggtcaggcaaggtacaacctggtgccgccagctgttttgcatggaagaccttatctgtaaaactcatagagagtcaaacaagatgtgtgcctctgaatgaatgggatccttggaaaggagttttaaaataggttttaaaggttttctattttcccctccagaaccagcaggaactgttctggatcacagcaacacgagtctgctttctgcttcttggcagagccgttgcccctgtggtggcagttgtgtggtgggtgatagctgggagtgggaatcgactctactccagcatgagggagagattcttttccaacttccccagacccgtcccacattgctcgtgtattctgccactaacaagaatgaagacatcacattggccgggcgcggtggctcacgcctgtaatcccagcactttgggaggccaaggcgggtggatcacgaggtcaggagatcgagaccatcctggctaacacagggaaaccccgtctctactaaaaatgcaaaaaaaaattagccaggcgtggtggcaggcacctgtagtcccagctactcaggcggctgaggcaggagaatggcgtgaaccctggaagcggagcttgcagtgagccgagatggcaccactgcactccagcctgggcgacagagcgagactctatcttaaaaaaaaaaaaaaaaaaaaaaaaagacatcacgtttaacctgaagtgaataacagctttgctccaaaatgaaaaaaaaaaaaaatttaatgaaatctgtcttactgaggaaggcaggaaaaggaagaaatacctcaaagcatcccttatccatgggggccttttcaggtagcattgatcagatttttagagcttaaatttatggattcagaagacaaccatttcctgccacagtgctaatagaattttttcttaatgtgagagttttgggaatttccaaaataaagatatgtgggatattctgaaagctaaccattaaattcccaataaactcagatttttttttgttttttttaatcaaagctctggattaggaattcttatttaaatttttttttttttaaatttttttgagacacagtcttgctctcttggccaagctggaatgcagtgacacaatcatagcagcctccatttcctgtgctcgtgatcctcccacctcagcttcctgagtagctgagactacaggtgcacaccaccatgcccagctaatttttaaaaaaattattagtaggccaggcacggtggctcacgcctgtaatcccagcactttgggaggctgaggcaggcaaatcatctgagatcgagagttcgagaccagtctgaccaacatggagaaaccccatctctactaaaaatacaaaattagccgggcgtggtggcgtgtgcctgtaatcccagctccttgggaggctgaggcaggagaatcgcttgaacccgggaggtagaggttgcgttgagctgagatcacaccattgcactccagcctgggcaacaagtgtgaaacaccatctccagaaacacacacacacacacacacacacacacacacacacacacacacacacacaaacttttagtagagatgagatctcattctgttgcccaggctggtctagaactcctgggctcaagctgtcctcctgcccaggcttcccaaagtacttggattacaagcatgagcactgcacctggctggaactcttagtttaaaatgatttcagagaacaaataatattcttttttttttttttttttttttttttgagatggagtcttgccctgttccccaggctggagtgcagttgtgcgatcttggctcactgcagcctctgcctcctgggttcaagtgattctcctgcctcagcctcccgagtagctgggactacaggcacacatcaccacacccgcttatttttgtatttttagttgaaatggggttttgccatgtaggccaggctggtctcgaacttctgacctcaggtgatctgcccacctgagcctcccaaagtgctgggattacaggcatgagccaccattcccgggcagcaaatattattttaatatagagacttatgaatataaatattaagttttgttgtttaatgctataaaagctattttttagaaaaagccaattttttgtgtacctgttacacatcccattgaacataacaccatcatgcagtgctgcttcgttgtaactatttgtctttgaaaaaaacaattttttttttgaggcaaaatttcgctcttgttgcacaggctggagtgcagtggcttaatcttggctcgctgcaacctccacctcccgggttcaaacgattctccagcctcagcctccctaagtgctgagattacaggcatgagcccctgcccctggcccttaaaatattttactaaaactaagtaggcatatatatgtctgcagtcagtgtcttgctttgcattccccagaacagatgctgagtcaaggatccagtgaaagtacttcctttgggaaatgatcccaggaagcactcacaggggagtggggaagtgagatggtaaggaaaggcaagccacaaatagctcattatcaggcaggttactactgtgggaatggagttagaggccgcaggggaaccctgggagccagtataggacacacgctgcagagttttcctcactgagggttgagggcgtgggatatttatatgccagtcacttacccctgcttgtgtcttgctggggagtggggaatgatcattttcaagtcctatgacagtaggcaaaatggactctttaggccagagaaagccctgaaagaaatagtggtacaaytggaaattggaaattgtgctgaaaatgggaaggggatatggctggttcttaacagcgcctgctgcattccattacgttattgttattttttttttcctctgtgctcttagtgctattattgtaagttcttagctggttccctctcaaccattatccttaaattgaatgtgttattgtcactatgttgtgtcctggtagggcatttttgacagtgaatgttgagaaagcatatgcatgtgacagggcggatttgttagaagcagtggaaaggtgagtactaaactgggtgtttaaaatgcaagcttcagctgggcacagtggctcacacctgtaatcccagcactttgggaggcagaggcgggtagatcacctgaggtcaggagttcaagaccagcctggccaacatggtgaaaccccctctctactaaaatacaaaaaaagtagctgggcatggtggtgcatgcctataatcccagctacttgagaggctgaggcaggagaatcgcttgaacccaggaggctgaagttgcagtgagccaagatcgtgccactacactccagcctgggggacagagcaagactctgtccccctcctgccccgccccccgcaaaaaaaaaggccaggtgtggtggctcatgcctgtaaggcaggtggattacgtgaggtcgggagtttgagaccagcctgatcaacatggagaaaccctgtctctactaaaaatacaaaattagccgggcgtggtggcgcatgcctgtaatcccagctactcgggaggctgaggcaggagaatcgcttgatcccgggaggcggaggttgtggtgagccaagatggcaccattgcactccagcctgggcaacaagagggaaactctgtctcaaaataataataataataataataataataataataataataataataataaatgcaagcttcacgaggccttttcaaggaaatgtttaaggaaaccaggtaaagataagtatgcaattaaggacttggaagttgtgtgatttttatgaaaggctttataaacatcactgtagcttggaagtttgactaacagttgtgtaactagaattatggccagtgacaggtcctgacttcggtgaatgtggagtgactggaagagctgagccattgccagtgtagcatgccaggaatggatctccacagagactgtggattccgttcaagttccatttccaggaactcctcgtccttagctagacagagtgtgtgcctgtaaagtcaaccactttaagtcttttatttcgaataagggaagataacaaatactttggcactcttgggaatgtttcaaggtggatctactggtttaattgttccagggtttctaatctgtgtgtcacatgcttacacgaagctaggcaatagggagatcacaggttaccgcatgtgatgtcactcagtgctgtttactatcggtacctttttggatgctttcctctctttattaaaatcttgcgcagtgtcttttcattttttcttcagaggtaattcagtctgttcttactggaggggaaaaataagtcatagtgctaatcttgtaagaagtggaatttaacatgctcaagctttcacatgggatcaagattcaataataaaagccttgacgttggaagcttaatagttttagaaataatttttctgcagtttctcgaatgtcagtgggcagcatttagaatgtgtttgactaagtagtgctggtcttcctcccctttaagcctgcacttgtggtacagccaggtttctagtttcatgacgcatttatcattggcctatgcctggcccttggttaggcttcctgtatttttcaaatgtggccaactagacagcattatacctcttcacctagagttgctttcttttttttaagtttttcattttattttgtttattttttaataggtaatatatgcatgtaggttcaaaattcaaaagataacaaaagagtaaacaacatagactaaggcactttcctgttttccctccccataatctgtcaatattactaacctcttgtgtgtcttaccagagatgttttgtgtatttgtgtgtgtgtgtgtgtgtgtgtgtgtgtgtgtgtgtccgtttctatcacctcaaatgacaccacattattctcattgttctgcatcttgttttttttcactgctcttaggttactcaatgagcacagaattggaacaaagggagatggaagatcttaacggatggttaagcttctggtttccatccagtagctggctggaagctgatggtttcaagcttctctaagtcgagatgtggtgataatagccttggtgtagttactgtctcttcagtgctaaggctcctgctaaacctgcgtctctccccagcccacaaataaagtttctatgatataggtgctcattacttttaaaaaaagaacgcagagagagagaaaaaaaatcatcagtgatcctaatagcaaagaatagctaattccattagttaggttagacttggttgtgtggtgatatagtttggctgtgtccccacccaaatctcatgaattgtagctcccacattcccatgtgtagtgggagggacgctggtgagaggtaattgaatcatgggggcaggtctttcctgtgctgttctcatgatagtgaataagtctcatgagatctgatggttttataaaggggagtttccctgcacaagttctcttctcttgtctgctgctgtgtgagatgttctgccatgatcatgaggccttcccagccacgtggaactctgagtctgttaaacctcttttgtaaattgcccagtttcggggatgtccttatcagcagcgtgaaaacggactaacatatgtggtaataaaaaataagacccccaaatctcagcagctgaaaatacagacgtaattcttttttgcagaggtgctgtgcttcagcagggaactgtgcttgttgtgactgcttggggacatgggctgatgagcagcatcttctcagtattgctggtccctgtgcagagggaaaagagctgtggaaggtctggaattaacatttagatgcctttttccactcatagctcacaggccagaagtaatcaaatggttccatccaacaggccagaaatatttggtgaacagcactaatgactaccacagttagtttttgttttgttttgtttttgtttttgtttttgtttttgagactgagtctcgctctgtcgtccaggctggagtgcagtggcgcgatcctggctcactgaaagctccgcctcctgggttcacgccattctcctgcctcagcctcctgagtagctggggttacaggcacccaccaccatgcccagctaattttttgtatttttagtggagatgggatttcactgtgttagccaggatggtctcgatctcctgaccttgtgatcagcccacctcggcctcccaatttttttttttttttttttttcgagacagcgtcttgctctgtcgcccaggctggagtgcagtggtgcgccctcagctcactgcaaacccccacctcctgggttcaagtgattctcctgcctcagcttcccgagtagctgggactgcaggcgcctgccaccacacccggctaatttttgtagttttagtagatggggtttcaccatgttgcccaggctggtctcaaactcctgacctcaagtgatctgccgcctcggcctcccaaagtgctgggtttactacaggtgtgccacgcccggcccttttgtaagttttttttttgagacggagtctctttctgtcaccaggctggagtgcagtggtgcaatcttggctcactgcaacctctgcctcccgggttcaagcaattctcctgcctcagcctcccaagtagctgggactacaggcgcacaccaccatgcccaactaatttttctatttttagtagagacggagtttcaccatgttggccaggatggtctcaatctcttgacctcatgatccgcctgccttggcctcacaaagtgctgggattacaggtgtgagccaccacacctggccccacagttaggtttttagattgttcagagcatgtttagatacacagatatgtctatagagaaatacacttttttttttgagagggagtcttgctatgtcgcatatactttcacatcaacaagataaatattccaagtactatcatatcattagtttcttcctatttcatataatgtagtggaatattttattgtcataaacacttctaaacatggatatctttttttagtggatgcatactgttccattatatggttgcataataatctgtttccttatgtatcctctactgagaaaaatgtacataaattcatttgcataacattgggtagagaattttaggagttgtggacaccatccctagccaagccatggattgctgttatagtttataggttataaacacaaacgctaggccgggtgcggtggctcacacctgtaatcccagcactttgggaagctgaggcaggtggatcacttgaggtcaggagtttgagaccagcctggccaatatggtaaaactctgtctctactaaaaatacaaaaattagccgggcttggtggcgcacacctgttatcccagctgctcaggaggctgaggccggagaatcgctcgaactcaggaggtggaggttgcagtgagccaagatcgcaccattgcactccagcctgggcaacagagttagaccccatctcaaaaaaaaaaaccacaagctctatttagaatactctctccttatcccattaatctccctcacaaaagtgtaataactttttacacttgatattttggtaggtaaataaattcacatggttctgagaataagtataaagtgaagagcctctcatcagcccctccttgccctcatctgtccagttcttcttacccctgctatccctcacagattttaatttctcatttccctccagaatttttttaaaaaatgtatttgcataaaatatatatatatatataatttttttggtagagatgggctcttgttatgttgtgcaggctggtctcaaacttctggcctcaagtgattctcccacctcggcctaccaaagtgctgggattacaggcgagagccatcatgctcagccaagattctttaaaaagttattattttaccctttttattttggaataaaattggatttatagaaaagttacatttagaaataacggccaggtatggtggctcatgcctgtaatcccagcactttgggatgccaaggtggatggatcacgaggtcaagagattgagagcatcctggccaacgtggtgaaacccygtytctactgaaaatacaaaaattagttgggtgtggtggcatgcgcctgtagtcccagctacttgggagggtgaggcaggagaatcgcttgaacctgggaggtggaagttgcagtgagctgcgccactgcactccagcctggtgacaaagtgagaatccgtctcaaaaaaaaaagaaaacaaaagaaaagttacagaaataatacagagagctcacccggtttcctgaaatgaaagcatcttatgttgccgtagcatgtttatcaccactaagaagctaacatcattgtgaattattaactaaacttcagattttatttggatttccccaggtttttcattagtatctttgttctgttcaggatacagtccaggacactacattgcattaaacagattctctttgaattgagagatagcatgtgctccatgtggttctgcatttagtgttctcaactgatgatgtcataattcattgatttcaaaatccaatggaatgtaactattatttttgagtacttcttctcctttttttttttttaaacggagtttcactcttgttgcccaggctggagtgcaatggcgagatctcggctcactgcaacctccgcctcctgggttcaagtgattctcctgcctcagcttcccgagtagctgggattacaggcacccatcatgatgcctggctaattttttgtatttttaatagagatggggttttgccatgttggccaagttggtcttgaactcctgacctcaggtgatccgcccaccttggcctcccaaagtgctgggattacaggtgtgagccaccacacccggctctaagtacttctaagaaaggaaaaatgctgccaattataattgtaagttactaattataagatacggcataatttcagagatgttcaaatgtgagaaaagtacattttagatttaatggaatatgatacatcttggaaagatttcaactttatttcacagaattttctcattctttttgtacctacatagaatttcactttataatatacaaaagatctttaagcaagcccttattgatactcatgtggattgttttctgtctttaggtattaaaatgctgtattcaataatttgggacatatatgtcatttcacatatatacagatgtgtatcagggtgacattccaaaagtgcactgctgagttagaggtatatgtatttgtaattttgatggaagctttaccaatttacagtcccactagcaatgtatgagaatagttttttttaatgacttcacaaataggccgggcacagtggctcacacctataatcccagcactttgggaggccgaggcaggtggatcacaaggtcaggagttcaaaaccagcctggccaagatggtgaaaccctgtctctactgaaaatacaaaaattagctgggtgtagtggcaggcgcctgtaatcccagctactggggaggctgaggcaggcgaatgacatgaacccaggaggtggagcttgcaatgagccaagatcgtgccactgcactccagcctgggtgacagagcgagactccatctcaaaaaaacaaaaaacaaacaaaaaacacttcacaaataaagtaggttaccaaacttttagatttttgccaatctaatgtttggaaaattatagtctcaatgtagttttcatttgtatttctcttatgagtataggttgagtttctgaaaactggccataaatattctttgcacatttttctattgggctgtttccaatttttatgcattaggctctttcagtattagtgacattattatctgtgatgaattacaaatgtattttctttttgtcgtttaccttttgatttgcttatacttgattagtgctttgtgtttgccacacaaagtttatagctgactctgttaatcttttctattatggcttcgggattttaagtcataattgtactcaagaaatttattaaggagttcctctatgttttcttccatttctcccatcctagcctttatgctattgtccttatgaattttacttttacatatattataaatcctgttacttttgttaattttgtcaaaataatcatcttttaaagcaacttaaatgaggacagtaaactcttaaacatttctccatgtagtagttagcatttctagggccattcattccattgtataaatacagatttccaactggcattttccttctacctggaagatatcttttaacattttttatagtgtagatctgctagtgataaactctttcatcttctgaatgtctaaaaatgtcttcattgtgcctttgtttttgaagattttgcttaatgttgaactctaggttgacatttttcattttttttctttgaatactttaaagatgtttctcttctgtctttttttttttttttcttttttggaaacaaggtctttctttgttacccaggctggagcgcaatgacacaatctcggctcactgcaacctccgcctcctgggttcaagcgtttctcctgcctcagcctcctgagtagctgggatcacaggcgcatgccaccatgctcggctaatttttgtatttttagtagagacggggtttcaccatgttggccaggctcatctcgaactcctgacctcaggtgatccacctgcctcggcctcccaaagtaccgggattacaggcgtgagccactgcgcctggccctctcctgtcttatcacttgaattggtagcaacaataaatctgatagccttctttgcttccctgtgtgtaatatttcttttttctctggctgcttttaagattttctcttgttggctttgaacagtttatgatgtgcattggtgtggttttctttatgtttcgtgtgcttgagattggttgaacttcttggatctgtgtgcttacagaattcatcagtttagaaagctctcagccattacttatgtaaatattttttctgcctccttctccttaacatataattatctgcttattagaccattttatgttgttgtatagctcactcttacacttttttttttttttttaaagatagagaaggtctccatctgccgtccaggctggagtgtagtggcgtgatcatagcccactgcagccttgacctcctggattcaagtgatccgcccacctcagcctcctgtagctgggactacaggcacatgccactactcttggctaatttttgtattttttgtagagacaggattttacaatcttatccaggctggtctccaacttccgggcccaagcaatcccccctccttggcctcctaaaatgctgggattgtaggagtgagccactatgcctgcccttcatttttttgtattgttttcccttctcttttcatttgtagagtttctaatgctgtgccttcaggttcactaatcttttcttatgtcttatctgccattagtcctatccagtgtatttttcatctcataattgtagtttttatcttcagaaaagttcagtttgggccatttttatatctttcatgtctttttgtgtgttttttttttttttttgagatggagtcttgcactgtctcccagcaggctggtgtgtcgtagcacaatctcggctcactatgacctctgcctcccgggttcaagcaattctcctgtctcagcctcctgagtagctggaactacaggtccgtgccaccatgcccggctaatttttatatttttagtagagacagggtttcaccatgttggccaggctagtctcaaactcctgacctcatgatctgcccccctcagcctcccaaagtgctgggattacaggtatgagccatcatgcccagccttttttcttttcttttctttttaaataacagctctaattcacatatcatgcagttcaccaacttaaaatgtgtatttcaatggtgtgtttgttgaaagttatattttatatagtattcaaatgtcaattatttaactttaaatatttttaaagcttttttaaataaatggagtatttgtagagttgtgtacctgttaccatgatctgattttaatatattttcattatcccctcaaaaatgctcatacccaatggcagctattcccttcccctcacctctcccagccaggcgcaactacgaatctactttctctcactacttatttcctattttgaatatttcatataaatgagatcgtactatttgtgttcttttatgcctggtttcttttcatacagcatgtttgtgaggtccacctattttatagtatgtatcagtacgtattccattttatggctgaatattgcattgtatgacggtatcatattttgtttaccagttgatgcacattcaagttgtttctccttttaggctattatgaatagtgctgttaagaacattcacgtacaagtttttatgtgggtgtgtataggtagatgcctatcttaccgatatatggaatggagttatagtaacttgtagcgtctttctctgctgactccaactgtatgtcagttctgagtctgttttggttgattattttctttacgtgtcatgcttttctgcttcgttgtatgcctggcagtctttgactggatgctgaattttacttcatgggtgttaaatattttcgtattgttataaaccttaaactttcagagacgtagttaagttacttaaacagtctgatactttcaggtcttgcttttatgatttgttaggcagacctggaccaatgcttagttgagggctaatttttctttttctttttgagacggaatctcgctctccctccaggctgaagtgcagtggtgtgatctcagctcactgcaacctctgcctcccgggttcaagaaattcttctgcctcagcctcctgagtaagctgggactacaggcacgtgccaccacacccagctaatttttgtattttagtagagacggggtttcaccatcttggccaggatggtctctgtctcttgacctcgtgatccgtctgcctcagacagccaaagtgctgggattacaggtgtgagccaccgcgcccagccaagggctaattattatttatttcccgagtactccgttcagtgccccatgatgacttaggagtgctgagaacaagcactcatgccagcctgtacgattctgctgtaattctttcagatggttctctcctgggcttttttttttttttttttttttttgagacagccttgctctgttgcccaggctggagtgcagtggcgcaatctccgctcactgcaacctctgcctcccaggttcaagtgattctcattcctcagcctcctgggtagctgggattacaggcatgcatcaccacaccctgccaatttttatgttttcagtaaagaggggattttgacatgttgcctaggctggtcttaaactcctggcctcaaatgatccacctgccttggcctcccaaagtgctgagattacaggtgtgcaccaactgcggccaccctctcctgggtctttagtagttttctcacttgcatgttctatgttctgttggattctgttggatactttggaccctttgcaaatctctagggttctctattctgtgcagctttcttctctttggttactctgtcctgggagctcttgctgccttgattttccctggactcagctccatgtcgttaattcagggcatctgccaggttctgcctcagtttactctttgtgcagcagcggtaagccaaagcagttgcagggctcacctttttgtttcctgtgtctcagggattgcctgtgtccttcattgcttgatatccagtcttgaaaaacgtataatgtattttggtttttataatttaagttagttgctttttccagaggaatagtaaatctggttcctgtcgctccatcttgtctagtattggaaatcttatgttttgttacagattttttgtttttattttcttacgtctaaatattttcttcattttaagtttactcagttgtgaggtgagagttactttatcttttcagatggctacctaataccatttatttacatgacatctggtttatcatctttatcatgtattacattcctgaatgtgttcgggtctatcttaggacttctcttgacatctcttctttgtgtatgtctgttggatgccagcaactgtctgttttagtaacagaggccttttaatatctttacatatccaggtgtgctatccctttttagagcttttttcccctcccagctttctcccaaactcttcttgtttgttcttccttatttttccatattaactttaggatccacttgccttccacgaagaaacaaaaaatcctgttaattatttatatgaattaacttaggcagaaaaaaatatttataatgacttgtctgttcacaaacatggtatggcttgcttttttttttttttttttgagaccaagtcttgctctgtcgcccgttctggagtgcagtggtgccatctcagctcactgcaacctcttcctcctgggttcaagaaattctcctgcctcagtctcccgaccagctggtactacaggtgtgcaccactacgcccagctaatttttgtatttttagtagagacggggtttcaccatcttggccaggatggtctctatctcttgacctcgtgatccgcctgccttggcctcccaaagtgctgggattacaggcgtgagccaccacacctggctatagtatggctttttgactgctgaagtcttcttttgggtccctcagtaatatattaaaatttcatacctgtcttgcacattacatgttaaactttttcttagatatttaggaactacaaatggggtttttaaattctattttatttcacatatgaaccattttctgagcagttaacaactcttacggcaaacattttaattttatttaactttgactcctcaatgtttagaaattaaagactgaggagttattgtaacctccataatactacatttacattgtagatgaataccaaatggctttttttaaatttaataaaattataggaattaacctttctgatcttgtaggtattttatcttattatagcccttataaataagactttattaatgtccttgtttagcaacctgtttttttgtttttgttttttgagacaaagtctcactctgttgctcaagctggactgcagtggcgcgatcttggctcaatgcaacctccacctcccaggttcaagtgattctcctgcctcagcctcctgagtagctgggactacaggcacccaccaccatgctgactaatttttctatttttagtagagacagggtttcactatgttggccaggctggtcttgaactcctgaccttgtgatccacccacctcggcctcccaaattgctgggattacaggcgtgagccgctgtgcctggccagcaacctgtttttgaagaataagttacaaaactgatggtgaacatatttcagtgaatagatttctttgctcgataagtgcataggaatttgcttgagaagcaaaaacagctttttggctgggtgcggtggttcacacctgtaatcccagcactctgccaggcagaggcgagtggatcacttgagtccgggaattcaagaccagcctgggcaacatagtgagaccgtgtctctacaaaaaatacaacaattagctgggtgtggtggcatgtgccagtagtcccagcaatgtgggagactgatgaggtgggatcgcttgagcctgggagtcaaggctgcagtgagctgtgatttttccactgtactccagcctgggcaaaagagtgagaccctgtcttagaaaacaaaaaaacccttaaggttttacattgctgaaagaaattaaagacaggccgggcgctgtggctcatgcctgtaatcccagcactttgggaggccgaggcgggcagatcacgaggtcaggagatggagaccatcctggctaacacggtgaaaccccatctctactaaaaatacaaaaaattagccgggcgagttggtgggcgcctgtagtcccagctactcggaaggctgagtcaggagaatggcgtgaacccgggaggcggagcttgcagtgagcctagatcgcgccactgcactccagcctgggccacagagcaagactccgtctcaaaaaaaaaaagaaattaaagacacaaataaatggaaagacatcttgttgcttgtgaatcggaagacttaatattgttaaaatgttaataactacctaaagctatctgcagattgaatgcagtccctatcaaaatcctaatggcattttgtgcagacttagaaaaataatcctaaaatttatatggaacctcaaaggatattgaatatccaaaacaagcttgaaaaggggaaagaaaaaaaaagctagaggcttcaattcctgatttcagaatatattacaaagccacagtaatcaaagcagtatgatactggcatgaggacagaccaatggaatagagtaaacagcccagaaataaacccttatgtatatggttaaatgatctttgacaaagataccaagaatttgtgtcttcaacaaatggtttgggaaaactggatgtccacctgcaagagaatgaggttggactcttaccttaccctagatacaaaaattaatgcaaagtatcttaaagacctaaacataagaccagaaactataaaagtcttagacaaaagcataggaaaatgcctcatgacgttagatttgggaataatttattggatatgataccaaaagcacaggcagcataagcagaaatagacaagtgggattacatcaaactttgaaacttctgctcggcaaagaaaacagcagagtgaaaagacaacctagaatggaagcaaaccgtatctctgataaggggatagcacaaggggctaatatatacaatatatacgcaactcctgcaacttaacaaatgaaaacaaaccaattaaaaaatacgcaaagggcttgaatcaacagttttctaaagaagatatacacatgaccaatgagcgtatgaaaactgctccacagccagagctgtggcatgcacctgtatgtaggcccagctacttgggaggctgaggtggaaggaccacatgagcccaggagttccaggccaggctgggcaaaagagaccccatctctaaaaaagaaaaaagatgctcactgacactaatctttagagaaatgcaaatcaaaactacaccttttaggatggctgctgtcaaaggaaaaaaaaaaaaaaccaggaaataaatgttggcgaggatgtggagaaattggaagtcttgtacacttttggtgggaatgtaaaatgctgcagttgctatggaaaatagtatagaggttcctcagaaaactaaaaattgatccagcaatcccactgctggttataccaccaaaagaattgaaaacaggattgcccagtggtacttttacacttatgtccagtccagcatttttcacaagagccaagaggtggaagccacctcaatattcatcaacagatgaatggaaaaagaaaatctggtatgtatctaacagtggaatattatccagctttaaaaaagaaagaaatcctgtcatatactacaacatggatgaagcttcagggcattatgctacgttcaataagcttgtcacgaaaagacaaatactgcttgattccatgtatatagggtatctaaagtagtcagactcctagagacagaaagtagaatggtggtttccaggacctttgggggatagggaaaagaggagttcctgttcagtggatatagagtttcagtttagcacggtgaaaaactttgagatgtattgcgcagcagtgtacatacaagttaacattattatactgtgctcttaaaatggctaagatggtaatttttatgttgtttgtttttgaccacaatttaaaaactttttttttttttttgagatggagtcttgctctgttgcccaggctggggtgcagtggtgcaatctcagctcacggcaagctctgcctcccgggttcacgccattctcctgcctcagccttctgagtagctgggactacaggcacccgccaccacgcctgcctaattttttttgtatttttttagtagagacagggtttcaccatgttaaccaggatggtctcgatctcctgacctcatgatccacctgcctgggtctcccaaagtgctgtgattacaggtgtgagccaccgtgcccggcctaaaaacttacggtttttaaaagctcggtgttacatctatttctatttgcagactaatcttaatattctatttgtgtagctattctttcctaaattacattaggctcctgaagatcaagagtccagatttcaaagaatattttacttggaccttaagcaaataagtgcatacacctgacaaatgaaaaggttacttttaggaatggaatggaaatatgaaattagaattgtttaggaaaatttaggctgtgtgattaagcataaacagaattcttgcatattcattcaagttaaacaaaaaaccaaatatacttactaggtgtatttttttttttttaagacggagtctcactttgttgcccaggctggagtgcaatggcgcaatctcagctcactgcagcctgtacctcccaggttcaaacagttctcctgcctcagccttccaagtagctgggattacaggcgcatgccaccacgcccarctaatttttttttgtattttagtagagatagggtttcactgtgttgcccaggctggtcttgaactcctgagctcaggcaatctacctgcctcggcctcccaaagtgctaggattacaggcatgagccactgctcctggccaccagggtacttttaatcaaaatgtttaatactttatgaatttcattctacagaaagatttaactcctgctttctagtggtattttgtctatgataactatccaaatgatactacaaaatttaaatctacttcatagttacaagctaaacatcactttgttataaaatagataataaatataattcagtattgacattaaaattcccagatttttactgacttcttctaaaaccgccctttttatgtaagaaaaggtagtgttttaaaaactacaaatttggctgggtgcaatggctcacgtctgtaatcccaacattttgggacgatcacttgagcccaggagtccaagaccagtctggttaacatagcaagaccttgtcttagccaaaaatacaaaacttagccaggtatggtgttgtgtccctgtggtcccagcaacttgggaggctcaggtgggagaatcgcttgagcccaggaggtggaggccgcagtgagccttgattacgccactgcgctccagcctgggcgacagatgagccctatcgcaaaaacaacaagaaaagccctataaatttaagtacacttcctattctggataaaactaactcaaaattttaatgtcaatttgggaaacttagtgagctttttgccctcaacatcaaagtataagcaaatttctcttaaaatcctttggcttccagtggagttgctgacaggctatgcacagcagtgggctgctgcagagagctgaatgttactgctgtggaaatgtgttgttgtaaaagccggcttataagtaaaagcagcacactcctttgctgaaagccctgcgtgggttaatagggggctttcagtgaacagcccactccctctcctgcgtttccacacagttctgctgcttcctgccccctcccctggacccccagagtgtttcttctgtagtattgcagcccccacaagaagcaaagctttgaagggaattgaaactttctatgatgtgggtttcagggtttttttggttttcctttctggaatagaaaaaaaaaattaaatcttgaaagccatatcgtataaagtaggcagtctggaagtcacttacctgagccacttaattatttttccataggctttccttgaaataacactatgatataataatgagaaattgtgggggcggggcggggagttggcttcctttaaaaaaattgctctggggcacttgttgatatatgtgctccttcgtatttgttgattcggaatacattggctacatatgttcatatatcaccctgtcatcacaagccctgtgcaggctacttactcttccttggtgccgcctctcccattcgtaaaataagggtgctaagacctatgtcatcagactggtgaaaggtgaaggagatcacatgtataaagtgcctagactaagatgtactccatggagcccaacctctgtgtacatattcacttgtttatgaaacaggcattagctgagtgtctggtgtgagctcagcagtgcagggccaagtgtatctgcccaggggtgcagtgatgcctggtgctgggatcaaggctcttggcagcaaaggccctcaaggcagaaggaacactatttgctccttgcttccgtggaggccttttgtctgtcaggatcccccttgtcagaggctacagattagaaactgataggtttatttcctccgtgtgtgctgtccattgtagtgaccactacccacatgtggcagtggctcctgtattagacagagcagatagagactttccctttcttgcagaaagttcttttggatggtgatgttttaggtggtgagagagcttggcctagtcactgttttctctttttttttgttgtttttgttttcgagacagagtctcactctgttgcctaggctagagtgcagtggtgcaatctcttttcactgcagccaccgcttcctgggttcaagcgattgtcctgcctcagcctcctgagtagctggaattacaggcacacgccaacacgcccggttaatttttgtatttttagtagagacagggtttcgcggtgttggccaggctagtctcgaaatcctgacctcaagtgatctgcccacctcagcctcccaaagtgctgggattacaggcatgagccaccgcgcctggcctgttttctcattttaaatccagttcatgtttttttaaagtagtggggttgatagaatatagggaatggcagataatctattaaagctaacttaggccctatttccatgaattttcctttgtgccaattttaggacttgaagagccactttttaaaatttttaaaatatggactgggcatggtggctcacacctgtaatcccagcactttgggaggctgaggccagaagattgcttgagcccatcctgagcaacatggcaagaccccatctccacaaaaaaatttaaaaattagctgagtgtggtggtgcacacctgtggtcccagctactcagaaggctgaggtgggaggatcgcctgagcccagtaggtcaaggctgcagtgagttgtgattacactactgcactacagcctgggtgacagtgagaccctgtctataaaataaaattatttaagtaaacgtcttttgcagactgaagaaggatacaattactatttcaagaatctttaaaagaatttttctacttaaccacatttatcttttctggtaggtcttttaaagttgcaatgtcatttactgtcaacagtctgtaacagatactaaggtcaagataattctcaattatattctttacagaatacttcattaattctgtagccttttcatggatctgtatcagttaagagtttttgggtggccttccctcccccaccccaggttttaaaaaaatcaagtgtaatttgcatacagtaaaatgcatggatttatgtgtagtttgaattttagcaagtgtacaactacgctaaagttccctgggtctttcctgtcatcccactaccccaagcatctgctgtctggtttctgtcactatagattagttttacctgctcttgaacttgatgcatatggaatcataaaacaaactcttgtgtctgtctccttttgtgtatcagtacttcattcctttgttactgctgagcggtgttcccttgtatgaatatatgcggtctatccattgtcttattgatgtacatttgggttgctttcagtttttagcttttataaagctgcagaaatattcatctgcaaatctttttgtagacacacatactaatttgccttagatatatacttaggagtagaatgtctgggtcatagggaaagcctgagtaactttgtaagaaactgctcaattttgccagtgtctacataccattttacattccattagcaatgtatgaattctaattgcactacatcttctccaacaattggtgttgtcatttctaattttagccattttaatgggtgtgaagtggtatttcattgtggttttaatttgcatttccctgatactgaatgcttttttcatgggcttataggccattcctgtatctgcttttgtgaaatgtattcaaaacttttgccctggttcccatttttaaaacttcaatatgtaccttacaatgagaacacagggacacagggagggaaacatcacccactggggcctgtctgggggttgggggcaaggggagggaaagcattaggacaaatacctaatgcatgtggggcttaaaacctagatgacgggttgatgggtgcagcaaaccaccatgccacatgtatacacgttctgcacatatatcccagaacttaaagttaaaaaaaaaaaaagtgccttaatcccttccacaccattttctttaaataaacaacaacagtgcaattggcatgacaatgcattttaaatctctctgagaagttgttttctaaagaaagaattacttattaatatgttgagtggcctagaattgtgaatgtcctaaataatgttaggaaggatttgaaatatcattggagataaaatattatgaataattttgcttccgataaggcaattatgtattcaaaatactcattgaagtaagtcttggccaggcgtggtggcttatgcttgtaatcccagcactttgggaggccgaggcaggtggatcacctgaggtcaggagttcgagaccagcctgaccaacacggtgaaaccctgcctctactaaaaagacaaaaaaattggccaggcattgtggaacgcacctgtaatcccagctacttgggaggctgaggcaggagaattgcttgaacctgggaggcagaggttgcagtgagccaagattgtgccactgcactacagcctgggygacaaagcgggactccgtcacaaaaaataaataaataaaataaagtctgttttattaaytgccaagaaatttgaaatgatatagacacttacttatcttttttcccctttgaaatgcttatttagatggaaaaattagaatgtaacctatcagagttcttggcttatcctagaagaatatcttatctgctgaaagtgaatgctttcttcctctgtgccttctcttctctgggtcaggagtctgactttcttgactatgatccaaatgttttagggcatattagtgataccatatgtaatctaattctttgtaccatactgctggaaacggacctgagccaatctggtcatccacaccccttaggactttttgataggttacagtcacaaccaaaaagacttgaggtagatggagtttagctgcttccccacaacactgctaccaagttataataaaagctagcctcagatgaaaaagtctgccactcaacagtcgttcattcaatgcatatttattagcaagcaggcacaaaacagatgattcgtcctgtcctgaaagcttagctcttgcattttgtgggtactctgaccccttttatgaaaagcttacttgaagcacaggtatagggtttgtcatgcttatagttggttccagtcaatcagaaatcctcacaaccgccaggcgcggtggctcatgcctgtaatcccaacactttgggaggccgaggcaggcggatcacgaggtcaggagatcgagaccatcctggctaacatgctgaaaccccgtctctactaaaaatacaaaaaattagctgggcatggtggtagacgcctgtagtcccagctacttggaaggctgaggcaggagaatggtgtgaacccgggaggcggagcttgcagggagcctagatcgcgccactgcactccagcctgggcgacagagcgagactccgtctcaaaaaaaaataaaaataaaaaataagaaatcctcacaaccaggccagggcccttggctcacgcttgtagtcccagcactttgggaggctgaggcgggcagatcacttgaggtcgggatttccagaccagcctgaccaatatgtgaaacccggtttctactaaaaatgcaaaaactagccaggcgtggtggtgcgcacctgtagtcccagctactcttgagactgaggcaggagaatcgcttgaacccggaaggtggaggttgcagtaagccgagatcacaccattgcactccagcctgggctacagagtgagacttagtctcaataataataataataataataataataataataataataataaataaatacaaccagtagccggagggtggcgccggtttacgcatccagactgacatttcaaacactatccctgaagacagtctcgttagattcctcttatctgttcatgcaaatgtggggtgtatccataaaatattttagacaaatctgcatatgtggatagtcactaatttcaccaatgagagcccatttcttacagggattattctgatgaacatgccactaattttaccaataaaaatatttttgatgcccagtatttgaattataaattttccagaggtatgcgtaacagaagagctactgtattatttctggaatgtgactccctgctttaataatggccatccgtctctggagtgtaagtttctgattagagcaactgccaccagatctgcccgatcggctccctgttgtagcttaaaccaatcatatatgttttatccttgtccctgcagttaaagtaaataaacaacccaggcccattatataaaattagtaagaggaattcatctggatagtccattctctatcctgatcaatttaattagtaaatctggtaaaagtctcagatgagagtttaattatacagcatccagtgacacaggaaactaaggtcttgaactctgattttgcttttgtgttgtttgaaatgtttgttcctcagtgccataaagaaatagcacttgaacatacatttaatttttttagtaaggccttttttacttcctgcagaaagggtacactcgccagcagttttgtcacgaaagtacaccaaacaaaggagacagggtcatttataacttgacgcatccaccctactgctgtgtccagtttccattgactggaaccgtaccttacattctgtatttgtcccagttgactagcaacttagaactttttaaaagaggcagaggtagagtggaacaaaggaaggaggaagtaacttgtgaaatgctgagaaaggtaaaaacactttaaagaggaacaggctatgacctaatgcttgcttggaccagtataagcatgccagggcaaatatttaggctaaattgtgggagctaagaacataaagtatattgatttttttattatggttagcagatatttaagaatgttagcataggtctttggataaattttgcttctaagaaaagttactatttattcctaattggacggggaggaaagtctttgaagaggaacctctactttactttttacagtgtcacattgacagcatgtgggacgggggctggagaggttttttccagtgacttaagtttcagggccctttgtcgtaaaacaggaggagaagcagagagctagctgatggagccgtcccttggttctcaccatgaagcgcactgggagtcagctttgtgtctccagcccagggctgcaggggataaactaggataaggaaggatgatgatgaaaggcaactagctggagttgttatcgcatctttccatttcagagcactagctaccaatgctgtatttaaccttatatctgtgctgggacggtggatcttgtcctggcaggaaatagctgttgtttgaccacactgaacagggatgcagaggacaccaaggttaagggggacataactgtgaaagatgaaaggcttcctcctcatccttccctcactccccagaggaatatattttcacttatggactaacaccaacacgttcaaacccacctaatactcaaaaagtaaatacttccttccctgcccccaaatccttgataaccactgtaactctttacagtggccatctccttggtaaccactgtaactctttgggaggggcatttttctgttgtctttttttaattttttaatttttaaattaattttttaaatttaattaatttaattaattaatttaatttttttagagacgaggtctctatcgcccaggctggagtgcagtactgcaatcataacacactgtggcctcaacctcctgggctcaagtgatcctcctgcctcagcctcccaagtagctgggactataggcatgagccgctgtgtctggccctctgtttatctttattttagaagattatttatttattttcttctttgtgcttcattggatacaaatctgttaattttgtttttcttttttgagacagagtctccctcttattgcccaggctggagtgcagtggtgcaatcgcagctcacctcaacctccacctcctgggttcaagcgattctcctgcctcagcctcctgagtagctgggattacaggcgcgcgccaccahgcctggctaatttttgtatttttagtagagacagggtttcactatgttggtcaggctggtcttgaactccagaccttgtgatccacccgcctctgcctcccgaagtgctgggatgacaggcatgagccaccgcaccgagcttaaatctgtttatttttatacatataaatttaccttagaaataaggcttagttttgatttattctgtttacatatatcatgcaattaggttttttaaatacttagttgatctttgtatgactgtggaaagattacatattgatctactttattaactttaagtgatagtatgattgccatggtttaattattcccatattaatgacaattatttccatttagtcttactgcagacactgctatagtgaacacctgtccattgcttcttagtactcctatgccagtatttctctcgggtcgatttcaatagagggattggctgggttaccggttacatgcataacagatactgccagattgccctccagaacgcccccatcaatttacagtccaccttctttgtataaaagtagcaatctagccgggcgcagtggctcgcgcctgtaatcccagcactttcagaggccgaggtgggcagatcacctgaggtggggaattcaagacaagcctgattaacatggagaaaccccatctctactaaaaacacaaaattagccgggcgtggtggtgcatgcttgtaatcccagctactcgggaggctgaggcaggagaatcgcttgaacctgggaggcggaggttgcggtgagctgagattgggccattgcactccaacctgggcaaaaaaaagagcgaaactccgtctcaaaaaaaaaaaaaagtggcactctccccacaacctttccctaggattgctatcagtattttaatttttttccaactggatggcatgaaatgaaatttcattattttgtaattttcatttttctaattactaattaggccaaatatgtcacatggattttggtcatctgtatttatttttctggtttgcctttttaatatatgattattttcatcggactgtgtgtaattttaagattttcatagaaatagttttttatttatatatagtccttgttatataagctacaaatagtttctcctagtcaattgctttaaaaaaaaaacttttagagttacagaaaagataaaaatagtagagcattcctctgtccgcctcacagtttcacttttctctagtgttgtcatctgtcttcgtcatctagggctgctgtgacagaatacgctatgcatagtctgcgtggtgtagacaacagaaatgtattttgttacaattctggagcttaggaaggccaagaacaaggagccagcggggttggcttctgctgaggcctctgtccttggcttgcagactgccgccttctccctgtacctccacgtgacctttcctgtgtgcattcagtgggagagagtgctctggtatctccctttttttttttttttgagacagagtcttgctctgtcacccaggctggagtgcattgcgtgattttggctcactgcaagctccgcctcccgggttcaggccgttctcctgcctcagcctcctgagtagctgggattacaggcactcgccatcatgcaggctaattttttgtatttttggtagagacggggtttcactgtgttagccaggatggtcttaatctcttgaccttgtgatctacccgccttggcttcccaaagtgctgggattacaggcgtgagccactgcgcctggcctgtatctctcatcttataaggatatcagtcccacctgtatgacctcatttaaccttgatttcttccttaaaggccctattccctgtagtcacgttgggggtcaaggcttcaacataagaattttagggacacaattcagtccataacatcatcttacattactgtggcactttaagaaaccaacactgggctgggtgcggtggctcatgcctgtaatcccagcactttgggaggccaaggcgggaggatcacctgaagtcaagagttcgagaccagcctggccaacatggtgaaaccctgtctctactaaaaatagaaaaattagccgggcttggtggcacatgcctgtaatcccagctacttgggaggctgaggcaggagaatcactggaaccaggaggcagaggttgcagtgagccgagatcgcggcattgcactccagcctgggcaacagagtgagactccgtctcaaagaaaagaaaaagaaaccaatactgatgtgttattattaattatactgcagactttattgggatttcaccagctttcccattaacctttctctattctgaaattcaatccacattgcatttagttgtcatctgcctagtcacctaaggtctgtgaaagtttctcagtctttccttgtttttcatgatcttgacagttttgaggagaatgggtcagctattttgtagaatgtgcctcaaattgggtatgtctgcttgtgcttgttttcctcatgactagactggatttttggcatgaataccacagaaggtgaagtgcccttctatcacatcttgtcagaggtacatgaaatccacacgacatcacgggttagtcacgagcatttggttaaaatagtgtttgctaagtttttcttctgtaaagttactatttttccctttccacactgtattcttcgaaacaagtcacctaagtccagtccacactcaaaggggactaaggaggggttaagcatcacttcttggagagaagtagctacatgtgtataatttggaattgttctatgaggaagatttgtctcctctccatttacttactcaatcacttatttatgacagtatggattcatgcatattactttacactttggattaaaatccaatattatatacttacgttgttgctcaaattgttctttatttgactattgcagtttttcaggttggctccagtatcacactcttctcccacccccttttcttaaaagatatttttatagtgtgttctgtaaatttggttttcaaatctacataaatggaatcatgctgtatttactctgtttttcttccagcttctttcactaaatgtttgtgagcattgtttgtgatgtgtgtggctgtagcctcaggcactctcattgccatataatattccattgtaagtaagttcccatttgggctgttttcagtgtttgcctattataaataatgattctatgagcttttaaaaaatacctttcttggtgaacatatgtatgaatttctgttgtatgtaaatctagaactggaattactaagtcagaagatgtgctatgtttattttttgtatgtaaatactgtcagctttctaaaatggttgtactgccgctgtaatcttaaatgctgcaggatagagggagagttcggtggggtcttggcaccatggattagtggtctggcctgggagtggcattctcacctctgttcacttaaccacaaagcagtcagcacaagcagtcccaccatggcctgggatgtggagagccagaattattatgttcaactttttaatccagaaataattaattttttttgaaaaatggtgtgatagagggagacatttttaggcaaatcattttcttcagatttttgtttgactacattccgtagatttaaataagaattcttactgacattaatttatgttgagttttcttttaatgtcccattattgcaagttatttagaaatgggttttaagtgtttccatattgatagattgatagatttttttatgatcttttcatcaaaacttttttttttttttttgagatggagtctcgctctgtcacccaggctggagtgcagtggtgtgatctctgctcactgcaacttacacctcccaggttcaagcaattctcctgcctcagactcccgagaaaccgggattacaggcacatgccaccacgccggctcattttatatttttagtagagatggggttttaccatgttggccaggctggtctcgaactcctgacctctagtgatccacccacctcggcctcccaaagtgttgggattacaagcgtgagccactgtgccccgccaaaacatttcttttattgtattgtagtcattgaacatggtctatgtgtatggtttctgctttccagaatttgttgagatctccttgtgacctaacacatgacaactgaataccctatttgaaaagtttttgtgttctatattgaaaacagttctatctattgggtcatgccactaattccttatttcatttttttgaagtgtgtttagtcttctatgattatggatgtactaattactcctattttcacttgtttttgcttgatagatttaaaatctgttatgtgtgatggttataatttttttggtaaattatatcttttttttttttttttttttgagatggagtctcgctctgtcgccctggctggagtgcagtggcttgatctcagctccctgcagtctctgcatcctgggttcaagcaattctcctgcctcagcttcctgagtatctgggattacaggtacccatggccaccgtgccagctaatttttgtatttttagtagagaaggggttttgtgatgttggtcaggctggtctcaaactcctgacctcaagtgatccacctgcctcagcctcccaaagtgctgggattacaggcatgagcgaccttgcctggtgattatatatctttaaacattaaacacctttgtcttttaattgctttttattgtgaattctttttttttgagatggagtttttgctctgttgcacaggctggagtgcagtggcatgatctcggctcactgcaacctccgtctcctgggttcaagcaattcttctgcctcaccctccccaagtagctgggattacaggtgcccgccaccatgcccagcttaatttttttgtttttagtatttagacgaggtttcaccatgttggccaggctggtctcaaactcttgacctcaggtgatccacccgcctcagcctcccaaagtgctgggattacaggcgcgagccgccaagcccagcctgtgaattctgttttatctgatgttaatattgctactttcttttttcctagcaactgcatagcatacctttgtctatcctttcatttcagttttttctgtaaggctttgtttttattgtctttattaaacatatagcttgaggactttttggggttttttggtttgtttttgatagagatggtatctcactttcttgtccaggttggtcttgaactcctgcattcaggggatcctcttgccttagcctcccaaaatgctgggattatgtgagcccagcctagcttgaattttttaaactcattttgaaaatcttgtcttttaacaggtgattttttttgcattttaaaattataactcatatgtttggacttattcccaccatcttattctgttttgtttgccttaatatatcttcttgctattgggtggcttgctcaattttcttagtgtcattttctctcttgctgtagtgatttggaaagtatgaaaacttatatagttcttctagtgcctcccttaaaaaaagaacttacaaagtatttcagagatacaaatgagtatggagactaacaatgttgggggagatgtccagggcttctgtagataagattacttttttctaccttagttccagaccagctgattgagaaacacaggagtcaaacagacaaagattaaaattaccaggcttggtttatctgtgtgggcatttagatccgaaggcaactggaattacttgcgcaagcagccactggcacatcggacaaccacaaggacagattctagacagtgtgtctgcaaatgggtagagccttcaacaccccggatccatgggtgattgtgtagaatagtgcctcctccaccctcttatctccggaggacatgtagcaccggcaagaaataaacatccgttgtaaatcacatcactaagatttcagggttatttgttgtcacagcttattctgacgaataaactcaattcatcatagggtatagagtgaaccagaaccatcctaattgtaggtttggtcagtctgaaaaagaggagcaggaaggatagttaggcttcttcatcttgtgcatttcttatctcactctgtgctcacgtatttattggggtgttagcttttttctctttgatgtatggtgctttgtaaattctaaatactgacactttattggttttatacattgtgtctatcttctcctattctgtgagttatctttttaaattttgtttctgggctcctgtgttaaacagaaacattaaatcttttttttttttttttttttttgtgagaccgagtttcgctcttgttgcccaggctggagtgcaatggcgcaatctcggctcccagctaatttttgtattgaaacactaaatctttatgtaatcaagtttctcaatcttttgctttacagtttgggtcttttttgttttgagtaaaaaagaaatccatccctgtttcactaatatgagttattttcctatatattcttataaaacttttaaagcttttcttcttatatctaggtttttaatccacttgaggtatttttttgtctttggtgtgtagtggtgtatggtatgagatagggatcaaatttcttccctcccccacacccaaaaacatggacaacaagttgtcccacgtgtattgaatattcttctcccattgatttgtaatgtccctaatgtcatatgagatgttttcatttatatgtggctctcatctttgcctattatatctgtgccaatagtacactgtgccaatactgcctaaattcttctaagttttaatatgtgatagaacaggagcccccttcttggtctttttttttttttgagatggagtctcactctgtcacccaagctggagttcagtggtgcgatctcggcgtactgccagctccgcctcccgggttcacaccattttcctgcctcagcctcccgagtagctggggctacgggtgcccgccaccatgcccggctaagtttttgtatttttagtagagacagggtttcaccacgttagccaggatggtctccatctcctgacctcgtgatccgcccacctcggcctcccaaagtgctgggattacaggcatgagccactgcacccggccttcttgttttttttcacaatgttttttgttcttcttggtcctgtgatcttctggattaatttacatgtattaacatgtcatattccatgtaatttattacatgtaacatgtaaatttattacatttaattcatacatcagcatgcaatttacatgtattagcatgtcaggtttcatgtagtttattacatgtaacatgtaaatttattacatttaattcctttattagcatgtaatttacatgtattaacatgtcaggtttcatgaaaagacctgttgagattttgattcgaattgcatttcttttgagggaaattactatctttatgatattgagtcttcctgttgataaacctgctttatttctccatttatccataagggatatgcacatcttttttttttctattacatttcgtaattgcttattacaagtagatagaaaagctattggtttttgtgtattaatcttctgtatctagaaacattgcaaaactttattatttatttgagtagtttatctgccgattctcatctgtattttttttgttttgttttgagacagtcttacttggtcacccaggctggagttgagtggcatgatctgggctcacggcaacctctgcttgccaggttcaagtgattctcctgcctcagcctcccaagtagctgggattacaggcgcgggccacccatacccagctaattttttgtatttttagtagagatgctgtttcaccattttggtagtgctggtcttgaactcctgacctcaggtgatccacccgcctcggcctcccaaagtgctgggattacaggcataagccaccacgcctggcttcgtgtctgtattttttagtagacagtcatctgcaaacaaggacagttttgattcttcctttccagttttctctgatttcctttctgtatcttgatatcagctagcacttccacttactacattgttaaaaagaggtaatgatagtgggaattttttcttgctttttattttataaggatgcttccaaagttaaggcataaagtgtgatattggctgttggaacagtctttatcagcttaaggaagttctcttttagctccattgtgcaaagacttaattggaaatgagtgttgattttaatgacttccttctctgtttttaatgagataatcgtgtgactttttcctgtaatctgttcatgttgataggcttttttttatgttgaataagattaattttcttttcatatgctattgaccatttgtatttcttttctgaattgagtgttcatagccttcctagattttttatctcttaggttgtgttagggaaaaactcaaactgtttttcctctgctgtcacatcaacacagcaattatcaacacaaaagacctctgtaatatgtgtggatttctgtggcagacaccagttgggtgtcctcctattcaattctgacaccatctacctggagatagcaggttgagggctcagtccccaagaccaccccctccttcccacaagtcacaagtccgggcctcagcaacttctgactgactggcttcaagttggggttcccggtatcccctgtttgggttcaattaatttgctggaggaatcggggaaactcacttactagtttattatgaaggctattttaaaggatacagataaacagccacaggaagagatgcgcagggtgaggtctggaagggtcccaaatgcaggagcttctgacaccgtggagttggggtgcaccaccctccgggcatgtggatgagttctcactcaccatcctgtcagcctccgtggttcagctctccaggagccctctgaaccctgtcctttgggcctctagtggagatttcattgcttgtccatgactgaaggatggacaagtgtgttgaaatatgattggacaaaaagggtataatctacacccagcaaggcctgtctgttcagattcttccagcctctctgggcagcattccttcctccagggtatggggtgggatgctttgtggaatgagggtcttacagctcacagtcatattagagccctgccttgggttggggaaaggagagcaggaaaacatcaaagagactctgtttcccaaggccggctttctgaggtccacagcgcccagcatataacaagatgttgtaacaaaacttatgggagttgggagctaggaactgtggatgaaaaccaataagtatataattataatatcacagattgtgatattgctttggagagacattttatctgttgtgataattaacttttattataggtcttttcccccaagtctctcctagtttttccctttgtgacttgttttttgtcacactttaaaattctgtgtgttaaattataaaattattcattatagcccaggcgaggtggctcacccctgtaatcccaaaactctgggaggccgaggcgggcggatcacgaggtcaggagattgagaccatcctggccaacatgatgaaaccccatctgtactaaaaatacaaaaattagccaggtgtggtggcacacgcctgtagtcccagctactcgggaggctgaggcaggagaatcgcttgaacccaggaagcagaggttgcagtgagctgagattgcgccactgcactccagcctgacaacagagcgagactccgtctcaaaaaaaaaaaaaaatttttttttcgttataattttatagttgtctgacagctttttcaaaatcatttcatctgtgttttataaatatgtgatattagcatctcattttcttttcatatatgttaacacctgccgtatattggataaggccttctttgttactgaattgaaataatcagttttcttgtaagtgttcatatatctctgggtccagattgtacgttgctgtgctaaaatcctattgttttaattactgttgatttatatttgggcaagtctttgaggctgggacttaatcttacgcttcagatccaatagcctgtgttcaaatcccaattctgccacttcccagcagctttgtgaccttgtgcaggttagtcactccacctccttagagctagttgaccctggtagtgctaacctcacagggtataatgagctgaatacaatacgcgacactaaactctccatcatcgytggttatcattgtcatttgagtgggtaatgctgctgccgcttctttgttaatcagtactttgatgaacagttcttcctctgctccccgtgttctttcctaccctcaaaaaacaagtggctaatacagatgacagcctgatgtctatggtcctgtctctgagggacaatctgttcaggtggagcctgttctctcctgctccctagcatgtaaaatctcctttctgcctgtctgtggtgaactcagcagaggttgacttcccctagctgtagggaagctgtccatttctccattggctctgccaggacctgtgaaggccatacacccagttcaagggggaaatacaaagtgtctctaggtccaaatagggttcttcaaatctttcctattaacaagcacatacggtattataattcccaccgactcctacatatttctatgttttatggttaattatccccaaatacctatagctgttatccaggaaaatgtttttcatttcaaatttaacagatatttgctaaaggaagaggtagtcaacctggaggcccaaaagtcaaatcagacctacagacaaattaggcccaaggatggattttaaatatttttattaacatttttaaatcatgagattttgtttctttctcctatatcatgttactcaaagaagaagtagtgatgatgtggtgcgacagggatgtataggcaaaaagatgactgctgctttctgtttctgacaacagaaacatcaatggggggatacatggatttttaacaggattataaagttaatcgtcaagctttaagcaaactttgtaaagagccctgtttcggccaggcgcggtggctcatgcctacaatcccagcacattgggaggccgaggcggtggatcacttgaggtcaggagtttgacatctttactaaaaattagctgggagtggcggcatgtgactgtaatcccagctacttgggaggctgaggcaggagaatcgcttgagcctgggaggtggaggttgcagtgagccaagactgcaccactgcactccagcctgggcaacagagcgagactccatcaaaaagaaaaaaagaagagccctgtttctggttccaggttcctaataaatggccctcaacccagcaccatagtctctgtagtactttattgatgtgttactctaacaataaaatattggcattatgtagagataattgcacatcagaaatcagtgatttcccccgacctgtaatatataaaatactccttaaggaattgaacttaaggtttgggctgggagggaaaatttcttcccatttccatctagctacttttctagtttcaattgggttttttgaaagaaactggaatttcaagagataggtagaacccaaaacttgttactaaccagttcccttgtttaaatgcatacgaaggatattttccaggttgcctcatactgtgctcattatatgcttcctatcytgatcaagagtcggctttggaaaaacactgttagcctgcaagttgactttttagaagcagtgtaattttgaataggtaatacatcgtacaatgcaaaagctgtaaaaaggcataaatctctcttattccctatttctagacaccgactatgaaggcattgatacgtttcttgtggctgcttccacagacttgctacctacgatttcatccacaatcgtatacatgtgtatataggatttaaactcacacatagaagtggtagcgcttaacagtccatcttggctatctttagttttcagttttcttttttttttttcttttgagatggaatttcatacttgttgcccaggctggagtgcaaaggcgtgatcttggctcactgcaacctccacctcccgggttcaaacgattctcctgtctcagcctcccaagtagctgggattacaggcatgcaccaccacgactggctaactttttgtatttttagtagagtcagggtttcaccatgttggccaggctagtctcgaactcctgacctcagatgatccatcctcctcggcctcccaaaatgctgtgattacaggcatgagccgccacgtctgtctagttttcagttttcagtcttaaacatttctcccaaacttcccatttgttggctccatggaggtggcccagtttatattcccacccacaggtgacggatgtgagtgctctcaacctcccgacacactgcagcaccttatccaactctcttgagttttgccagtctgaggaaaaaatagtacctcatagtggaactttgcatttctgttacttttgtgataacaaattgaggttaggtatcttctcaatgaatttaacatatttttccagtttatctcttgatttcgtttatgtatcttttgccatgaaaactacttaaaaatgtgtttatggcttttagattttgtatcatttagcaaggtcttccccagttggagagtataaaaaagaattcatggtttaaaaaatgtattttaaaaagtctttgatccatctggaattgtagaataagattaggaggtatgcaggtttacttttgaggcaaaagtatgtataaagtaacacttttctatagaaaacttgggaaaatacaggagggaatgaaaatgaaccccaatcccagcaccttcttatctataacaactgagatcatgcttatgctgggatttcaatttttttcacttgagattaaaatacaaacataggtttagaatatattttaatttatttaatgtttttatgggtacaagtaggtatatatatttatggggtacgtgagatgttttgatacaggcaggcaatgcacaataatcacatcatggagaatggggtatccatccccttaagcatttatcctttatgttacagacactccggttgtactcttttagttatttttaaatgtacaattaagctattgtggactgtagtcacccacaccctattgtgctgtgaaataataagtcttatttatttgtactatttttttgtgcccattacccccacactacctttcccagcctccgataaccatccttctactctctatctctacaataattttaaatggttgtttaaaaagggtgtcaacatttttgtttttaaaccatcccaaaccgtccctttaaaggaatgcatgaccagagggttgcctttaaatcttgcacaattaaaagcgttttctctgaggcagctgatctcaggaaatcttgcacgattttgaagatgcccgtttcccataagacccggccctgcgggggcacttggcgggtcttggcagagctaaggggctgggccctgctccgggagggcgcactgcaggggcccgggcctggcgcggctgcagcacctcctggcagcaggagtgcggcgggggaggcgccaggaggcccctgccccggctgccatcaccctcgggtctgtccctggcctggggcagagcccttttgctcgaagtcctttaatcgctaaggagctttcccagactcttccctctgcaggcccgctggcctctgacgcatgtcccctctgcggagcgtttgggcactggaggagccctggttggcacaggccgccccgcgttcccagctggggaaggaaggcgggcggccaggcggggggaaagaaagcgggaggtggggcggggtgctgtccgtccccacggcctcgtcgcgcgcggggctttttccaggacttggggacttccggggttgcgctgtcgtgtcaggccgttgggccgccgaggggtgtcgctgcgcccgctgccccgcgcggccctttaaactttgttttttaaacttcgggggtgtggtcgcggcgcctcccctctcggcggctggcagtccttgcctctgccccgccttccagatgctttggagtcatgagccgggagggcgcgggggcagctttggtagccgaggtgatcaaaggtgagccgggagggcgggggcttcccctgggggctccggcacccgcgctgggacagggcgggcagtgctggcttggaggtgcccctagtctgggccccggccgcccttgtctcctgcgtgtgggtggcctcggcacttgtccccaggctctgggctacagcgctcatgggcggctgtgacccttgcgtgcctgcacctgagcctagtaggtgagctgcacctccccgcccgcgggagcgagatccttgggctctgtcacagggatcaaaggtccttgtggttggaaaggattaagccctgtcacccatttgagtgtttgtggttgcaagaagttttagctgaggagtttacaaggaaataaacgcagtaattgcatgagttgaattgcagatcaaaaaaaaaaaaaaaatagtttaccatttggggaaagggtgccagctggctctgctgaaagtatatatattttaaaggctgtgcttgattttgccacgttgtgagtgtaagtattttcttagcaccactagtattactattagatattgtggatgactttatttcacccgaggatttttaggcaaggaatgcgggtggagcctcctgagccttactactcattaccattcttgctaacctcacagcagcctaactgcatttatgcaacacaagttcatctcagacccatcatgcagaaacctctcattgcttctgttttaatggtaatttgtctaattgtaaaaataccgaagtagtgattccamgttagaaagtagtgatccctaagaacagttggagaaacatatggtttgttctatagctgtaagcggtaattttgaagcwattttgaaagcattctttccctttaagaaaaaaatagtttcttactgaaatgactttttaggatgtcttgaaaaacgtagtgaaattcatctagaaacttacaaggttgatgctagccatcamatgcatgctgcaatttgctgaaatgtcttgatccaggggagctaaacttttacaaaaataggtttgtttagaagtcatatcactacatgaaaaatcaccacttttgaaacttacggttaaaggcagtttctcttttaaaaatgtgctcattgattattcccacccaaatagccagaatattttgtaattacccattaccactcctaccatctgaaacgtgcatgaaaaaaatgaaaaattgacttcatctgaaaagagttgtgtcatgatatatgaaacgttttttgtaacctccaggaaggaacattgcaatttttccatttcagatcgcctttgttttgccattctctacagcagaccaaagagtgcatcaaatgtacattatttcagcatagataatgaacttgaatatgagaagtaagtattgctctttaaaagattttaactttttgtttttgaagaatctaaaggtatggttataaatgggatggcctgggaaaattataaatctattgattgctaattacaggatgcttgtttttcacctgtagtaataaaataaacctttagagcaaaaaaaaaaaaacctccctaaatttaaacatttagatttgctagtctaatatttacactacaatgagatataaatgtgtactaagtaagatattgtggttttgcccttggaaatatgtgtggaaaaacagcttttttaatttagaaggtatgttcatgttcattgaggttacatgtaggcattatagcacttgtggcatttttaagtaggcattatttaccagaatagtcttccaccagtaaaacagtacctttaagttgtattggcccataacaatttggtatatgcttgcttatcttaatttgatcttgtagacccaaaaaaggcatttatattcagagcatctagaatgtacatcacatttttatttttcatttttaaagcttctacgcagattttggaccactcaatctggcaatggtttacagatattgttgcaagatcaataagaaattaaaggtaaagtctttaagatttgacttaagtaatcattgttagcttgatctgggggacgaaagtaaggaaaacatctctttttaaaaaggaaatgacatgtttttcactgcagtggtgtttgggacatgcacatggttttcttgttttataagatcatagtgtatctatttgttttctagagttttgaatgaacagtttaagtttgggtcgtttggttctagtttgaattagtgatgcccaaatacttgaaaagccaaagtgggaatcagttaattaagtgaacctcgtattgtctgacctaatagaactgaaacttaacaagagaaactcttcccttgctgtggccattgttctttctgccttcattttgatggggagtgatagcaaactaacaagaaagctggactcatcttactttctctcctattttgaaactcccatgatactgtactacatgatcctttatacatacgattaaggggcgtgagaatctagggcaaataagcatgtcattaaggctgtattactgagagttacacaagtatatttgtattggtttgaacttagaccacattcatgtatgtaaaacactgaattgttggccatgcacggtaggaagttatgtatgtactgcttactagcagttccaaatcagtcactgtaaattctcaactggaaaatactgctttttgggacaggcacttaaaaaaaaaatttaattgaatacagagaggaaataaaatttatttttaattagaattttaacatgctttaattaaaaattcatgggtaaggcagatgtttttccttgaccatgaaagctatattgctacagagctggagactcttcttttttgcctttcttaaataggaatataactatttatggccttgtgcatttgagttccccctcctttttccagttgccagtggcagatcttttgtttcatgcaggactaggaagctaaaaataattctctcttcctccaacatttgttcctttgctttaattttggaaaaaaatttttttcctgtactcaaccatctgtggacttttagtctttgggtcaaccaaaaatgtatcagtcctttttttcttcttccttttttttttttttttttttcccgtgagacagagtttcgctcttgttgcccaggctggagtgcagtggagcaatctgggctcactataacctccacccccctggttcaagtgattctcctgcctcagcctcccaagtagctgggattacaggcatgtgccaccacgcccagctagttttgtatttttagtagagacggagtttctccatgttggtcaggctggtctcgaactcctgactttgtgatccatccgcctcagcctcctaaagtactgagattacaggcgtgagccaccgcacccaccagaaaactttttaacatataaatagaaatatgtacacatcatggatgtagagctcaataaactttcactaatggaatatacatagatgattatcttgatcaccagtcaggagcagtgcactggcggcaccccatagcagccctccatgctgtcttccagttcctgtctctgcacacccctcccctggttattcactgccctggcttataacactgtagatgattctgtatacctttttattttaacttaaaggctttggggacagatttctttaaaaaccaaacagaaggaaaggtggtcttttctaccactcttggtttgctctttcagaagcagcccatgctttaagcatgtgtccattcatgtcccctyccctcttctctaattgtatgttcattctcatcccagaatgtgcctttttatgggaagatatatggtatttgtgggtatcaatgttaatcttttcaaaggtcttgctaataatatgaatggttatgggatttggaattgatcttcatcacaaaatgaaattgtggaagacttgaaattaaaaagaaaatgctaacagttatttatttttatgcagtccattacaatgttaaggaagaaaattgttcattttactggctctgatcagagaaaacaagcaaatgctgccttccttgttggatgctacatggtaagtatttgttttcctaatgtattcataaaaatgcacacaacagtggttctttacatttgcagttggaattttgaaatcaagataatgtcttgatttctcttcagaaagaacgtgttttgcttttaaaaaattgaccaattcaaggaagctgtgcttatgtggaagtagcaggtagatgagagatctcctgtaccttccacttaattttgctgtgaacctaaaactgctcgggaaaaaagcctatatttttttaaaaagtgcccaactactttggcaaaggtttatgttttatggcactaaaggttggaaaatagtgctccaaagctatttctattcactcgtgatccatttagtgagttgtaaaatcatcttactggggtcaggaccccactattaattttctaaaaatttttttaaaaagtgctttctaaaatttgaatctaggcatttttcccctaattaaggtcatctcctttctcatcaaaacatctagcaggaggccacgggatgtcagtgttgtcagaagatgggttacataccacacggattacatacatatgccatcaagtgctccatttggatcattggaaatgtrctttggaatagcagtatttacataagagttgtgaatttcatttatttgtaaatatgatggaaaagatttattttttgaagagtcacattttgtttggcacccagtggatttgtctgcaggggccctgaaagctgcaatttttccagagccagcttagagctcctccagagtactaccccctgtgtctggtggtgagaaagctggccacgctgttcagtggggagtagccaggggatgtttcttccacccccaccccaccatcagtgtaatagttattctctctgagacttgaaaaaaagggttgttttggccgggcgcagtggcttacgcctgtaatcccagcactttgggaggctgaggcgggcagatcatgaggtcaggagatcgagaccatcctggttaacatggtgaaaccctgtctctactaaaaaaaaaaaaaatacaaaaaatgagccgggcgtggtggcgggcgcctgtagtcccagctacttgggaggctgagggaagagaacgtcgtgaacccgggaggtggagcttgcagtgagcggagatcgcgccactgcactccagcctgggcgacagagcgagactccgtctcaaaaaagaaaaacagggttgtttttggagctctttaggttctttcttccccacttctagcttgctccttatctctggcatgccttaccggaccattttaaaattattttctggagtatagtttgataatctggaatttacaaagactagtccaaaagttggtgatattagttgaaatcgtacctcaagatttaataattttcttttttatgtataaggtatatcattaacagcagtggttaaggtctttgttttgttttcctatttatgctcacaaaagttgaattaaatgcttctgattgggaggccgaggcaggcagatcacttgaggtcaggtgtacgagaccagcctggccaacatggtgaaaccttgtttctactaaaaatacaaaaattagttgggcgtggtggcacatgcctgtagtcccagctactcgggaggctgaggcaggagaatcccttgaatccaggagttggaaattgccctgagctgagatcgtgccactgcactccagcctgggtgacagtgagtgagactttgtctccaaaagaaaaaaaaagtttctgagaaaacttcaaaatttattatcatccctgaaagtatgaaacataggttatagattgtctattaaaatttggtttcataagctttcccagacgtattggtgttttcctttctcccagcctctcttggtgtttctcgtacttgcagcaaaagccttaaaaaaaaaaaaaaaagtttgagtagtttggcaggcgtggtggcaggcgcctgtaatcccagcgacttgggagaatgaggcagggaattgcttgaacctgggtggcagaggttacaatgagccgagatcgcaccacagcactccagcctgggcaacagaatgagaccccgtctcaaaaaaaaaaaaaaaaaagaaagagaaaagtctatgtatgaacccaagaaagaaaaagagtatggagaagtgggtgttttaactgggacatttggtcctattacttggccagtcactggggagaggaacctcatagattaacataaatcatgacaactttatagaaaaaggaattcagccagaattcttgagattcataaaatattaaagggaaccctggagaaatggtccttggtgtgacagaaaaaagttccaaccgttctttgtggatcttgcctttacactgacctggacaaagtctggatggctgaagttccatctaggagagagtgctcctgagcagaactccaaagcagaggggccagaccgggccacttccgggtcaattgctgtctctggtcagatgagatgtccctgagatggtagggtcttgaggagccaggcacgaggactacagcgtgaagaacctctctgaaggtggctatgggcatagtgggaactcagtcagggttgtcttaaaaacagaaacagaatgtgtgataagtttataaataagaaatcactctttttaagtcttgttgctgtcgtttttaaactactagtgaacaaacaacaaccccttgacgtatgtattgaamattttttggcatatttgtttccagttttatattggccttttgactttgtttatggttgtattttggaccacagaagcttatttttctatagttaatatatcttagatttagaaatccttccagaatttcacaccttcaggttagtactgatttgattggttagggaagtgccaggtaagcaaatttggatcttcactcgcatttattacttacccagtgaggagctagcttggcaggaggattatagctcttggctgtgacagaagcctttgcagccatagctggctgctaaaataggaattgggagctgtaatgttgataggcaggaaagcaggagaaaagcttctaagaaaaggaaatgtattcatagtagaaaagcagtgtcaagatataatatggacacctgaaaagataacacatcaaagcaagtgaagctttgatctggttaaaatacgttaaatcctctggttaaagatttgtggagatgagtgctagttccctataaactgatccgcatccttgataacgttttctggagtcgtcaggaattttggagagagtaaggttctttagtgttcgacttggcatggtaatgttaaaacaaaaccaaaaaaatctggaggaagaatctttaggaaagaaatattccaaatagactgactctgtttatttttatcagtcctttttgaattcagggcttctgaaagtaacgtgtttccttcatccttgtatacacagaaagacctaatgtgggttgggcagagagtgtgaggtaatcctttatggcatggaaataaagtgttatatttattttttatcttaaaaacagaagaggtgaggcttcaaaaatgtgtaaaatatgaattgacatgcccacaattggtctttttgacagatggtcaggcgtcatgtgtgttacaagaagtgagaagagtgagttgagtactcatttgtctttattgtatttcaaagtattgctcttcatgtggcctggtaaatggctttcccattcagctatctgaatggtagactctttggtatcaaattagagtgaagctaaaaatcttttgcaccactgtaagagttgaaaaatataaaagatgacttgagcttttgtttgtttgcttattcacaaaaaggtaaacatactatattgttttacaaaataagtttgctgccctatttaagccagtggctatgacctggccagattgagggataatgatacttaacctgtcatttcaaagtaaaggtgaaattttaagtggaaaattttaagtgcttttcaaaacaaattcataataaaaatccttttggaaagaaaagttggaaattttgttttgttaattttgttgtaaaaatgtcatacacaaaatccatatttgcactcttgagaaatttaaaaaatcttttaaaaagaagtttttatatttctagaaacaagacgtgcacgtgtgtgtatatgcacagatgtatgttgtgtacgtatatgttttatgtttacagtacaattttaaaattttttattggtacataattgtacatatttatgggttacatgtgatagttttatacatgtatataatgtgtgacagccaaattagggcagttgcagtatccatcgcctcaaacatttgtcatttctttgtgttgagagcattttaaatcttcctttctattttgaaatacacagtaagttattgtaaactatagtcacactactgtgctatctaacactagaacttgttcattctaactgtacatttgtaccaaagaaccaacctctcttcactccccctgaccacacacgcccttcccagcctctgataacccttattctactcttggcctccataagatcaacttacttagctcctgcatatgagtgagaacataatggtatttgtctttcaactttggttacatcttcctgccacagcagttagattttctgaagatacatggtattcatctcttctatgggttaaatgtacttttgagggctagcctgggaaattaaccaccatttctaacatctttctgtgtataaaataaatgccaagcattttgtgtaaaaaataaatgacacaagcaaacttttggcacgtagcttgcaaatttgctttcctctaatgtttaatagattactttggtagagctaattgtaacatgtaggttccctgttcaaaatttatcactgtatattattattttttatgtttaagcagtttttatagctgtaagaatggcttaccttgtaagcatttatgttgaaaatgatgatactaattaaatttaagartatattaactcagcaatctgtgagaagaattctaaactgcattaaatttgagattgcctctacagttatgataagagctcagggactttgttatttaatgatgatcttttgaatctgtggtcccactttttaaatgatttaattatcttggactcagaatagccagtgcctgcaggaggaaaggatcagttgggaagttaagacaagggaacagagaacgaggatctagacgcagtgggtaagaatccagttcagcaaacagctgcccagatgggacagcagaggctggaggacagaatgaggtcataacacccttcctgggtgtctgtgaaaggcagggcaaacagcacgaggcaaccgtcagtagtagccaggccccagctagtgtgaggcgaactgggctgagcaaagggacggcacaggccctcagtgggaagccagtgcttccttgggagccggccctgtgggaggcagctgtctgccctgctcacagtgcatcacagtttgacttcccttgccacccgagggcttctgacgggcgtttccactgcccgtggtgcttgctgggtgctgttaacttggggaaaaagtgaagagaaatggctctctgatagcttaagatccttgactgcagatccgttaagctttctggaattttgggtcccatccttgttccggtcattgttttagataggatgggttcctgtctataaatacggccagaggagcaggccctcttccatcaataataggcggtgtgatcttggatgagcagttgatgccaaggtctggaaagttgtagcctgccagttttatgaaactcacagagcattataaatagttgtgggttttttttcctctgtggttaaaatttaggagatttcattttttaaaaaatcaagatttttttcttggtctttaaaaaatgtccctaccactcaaatgtgtactaattcccagggccaattcactatttttattagcagacttggtagatacgtgtttgctactctgaacttccagtttcattttgtcgaaattgaggatcattatatatatcattatatatatgtaaaagtaattttaaaagttaaaactattgaaatataagttcatctgaggttttttttaacgagttttttttcttaaccagttttgtgcaggagctatgaaagtgattttatttacttttttattctctgtgttctttcctctgctcaccttttttattgagcagttgaatgtgtaagcctatcttcaacttgcattgatttgtgagcattctttgttaatctggagagagtgatttttttttttaataatcaatcaagttcttggcgtaggaaagactgtatcatctggctgacatgaaaatagtcacaagagtctttaagtgctggaaacattgtgacatctctccaggatttcctggttactcaggctgccacatttgttgctggaatttcaatatcctttgtcactctcagctctagggtgaaatgacttgtgtaacgtttgggttctaaattgtacagaggctctctaagtatataaataaagcttcagaatcctgtgcataagagtagaaataggaagcacatgtctaattgggtttccatgatttgaggcccggcttgtcagcattgaaacattgaaaggagaagtaatgcagctgggatcctgttgcttctgttgcttgttcttccatcactgctagttcaatacctccgaggttttgaaacgtatgttagtaatcgagggtccagcgttctcacagggactctggcatgcagatggtgattttagaaagtgggggtggtgggaagtcctgggaatggttgaggtattgttcagcaaaaaaagaactttgtgccatgactttgaaaaccacaccagtctcaagcattttcaaccacagtatttgcgtgtgtttgtgtgatatttgctcgttcagagagagtctttatcctagagaaacaaggtcttactgatgcctcctaagctgcatctctgtgcttacgcctcatgtatttgtctattcacttttaacaaatggaaacggccatttccttaaattgagtgtgctactrcacamtattgctgcccagcaaattactgcaaaactttgtgacctaaaacaacagtacgaattgtcttagaccatgtctatgagttaggcatctgggagttgcttaacttggttgggtctggtctggttctgtaccgtgtctgggctgcattcacctggagggtccatgtctaagggggctcagtcacatacctggcaggttagtgccgattgctggcaggaggcctctcttccataccacgtgggctgcttgagtatcctcccaaaataacagcttgctgtacccagagcgagggttctaagagaaagcatgacaggagctacctcttttatgatctagcctctgaaatcacaccctattactccagtatcctgttcgttacacaggggcaccctgttcaccgtgggaggggaccacacaagggtggaaatgccagcagatgagactctttggggttgcctgggaagctggcgatcacagctggtcagcagctctcttggtcatcatttgttgtttcctgttcttaactagcactgtggaattagagtgggcattctatatatatagcttctcatgaaaatatatcaaaagaatttgagaaacgccaagtgtccagactgccagaagcacggtgatagatcataagttgcatcaatttagagtttactaatctgagaatttgtgttaatgtaggagttatttataggattcttctttagtaacaaatttagaatgatttcatttgggaaggccttttgaatcagcaagatgagtaggtgtaaaagtaaaagttacttccttcatgcctggccaaaaaagaaaaaaaggtaaaagttatagattggcaaatatatctttgatagttatataagtggatttgttctgcatctgtaaacttccttcagtttatctagttatgctttacattatttatttatgtgccagcattccccaactggatttttaaattacagtcttttaaagttcatcgtcaggaatttaggggttttttcccccataggaaaaaaatgttacattgttcttgtggttttttgaatcaaactagtgttccaaggctaaaccacagtccttaatgtattacagactatttttgctttgaaagttaggagaaagtaataccattgcaattttactaattaaagaacccaaagaactgtaatcacaagcaggaaaaattatcttaaattagtgcttaaggaaaaatttgtataatttgagagaaggccttagaaatttagagaaattcctaaatgggtctctagatttcattttagtacacagatgaatcagactctattcttatttttattggcttcaaggtgtttttttatttggttttgttttttggttttagggttttgttttgtttttttgtttttgccttttgagactgactcttggtctgtcgcccatgctggagtgcagtggcgcgatctcggctcactgcaacctccgcctcctgggttcaagggattctcctgccttagcctcctgagtggctggggttacaggagcctgccaccatgcagggtaattttttgtatttttagtagagacggggtttcaccgtgttagccaggatggtctccatctcctgacctcgtgatctgcctgtgatggcctcccaaagtcctgggattacaggcgtgagccaccgcacccttccggttttaggttttgttttttgtttttttttaatctgctaggaagtcttaaaatagaatggagaaaatgaaagactttactgatgttatctggtaagtgttagaagaggcatacatgcatcggagactggaagggaataagggaatttggaaaaaacaggctgatttttttaaatgttttaattttcatgacttataggttgatgcttagaagatctgtgtgtaggccggacatggtggctcatgtctgtaatcccagcactttgggaggccgaggcaggcggatcacctgaagtcaggagtttgagaccagcctggcaaacatggtgaaaccccatctctactaaaaatacaaaaaaactagccaggcgtggtggtgcacgcctatagttccagctactcgggaggttgaggcaggagaattgcttgaacctgggaggtggaggttacagtgagctgagatcacaccattgcactccagcctaggcgacaagagtgaaactccatctcaaaaaaaaaaaaaaagaaaagaaaagaaagaaacagaaacaggccagtcattgggaaaattttccgtttatgagtcttgagtcagaaaattggtgaaatgccctttggaagctgagtcagtgcttatgactagttttaggatatgtctgtttctgagtttctaagatccttgctggatctttgaactttgaaaaatttctcttagtccagtgatagtttcacattgatatcaacttttattaaacatttaaaattttcctaactattgtaagtagatttgggttcagctaagtacatcagtgaatcggattggtgtgtaatgaaaccataagacatgggtcccarcttcagaatgcttcacatttggttgtggaaacaggtcacatgtatcatgttaagtaatggagataaaaagtttgcaattaactttttttagtgatttctttttttttattagtgaaatttaaaatctatttccccaaagtaatctttggagttcaacctaattttagtgataatatatgtgccagatttaatgctgtttctccttcccaccgctcccgcctccccaaccccaaccttccgtacattagttgaaagggccctgcaggaaggttctgaagtcccaggcaaatgtaatagggggtaggcagaggacttacttagagagatggtggtgaaagtctcaaactgcagatttctagaacaaacaggttacttgtaagaagcagacagagatacttagatcagtaaaatacttctgtaacactagaagtgagaagacatgagaacgttatctagaaactatcaagaggaaatgactgcagaccaaaaatcctacgcatagtagtcaaataaaaaatgtcaagggaaaaaaaaaatgtttggaaaggcaaggaataccaactatagacctcaaatgctgaagaatatacttgaggtattctcccaggttaaagtcaaagcatagcatagttctaaggacaaaagaagtcaatgagcgtcgaaaacaagtgcagtttgataatcaacttgttcagtattgcaagccctcacacctacatggacagagttaatcacagtctgtgttctgcctttgtgtctctttccacctcaccccagtctaaccccatccccatctcctacacgctgcttagctgtcatttcagtggactttcaggaaggaggggaggtaaaagcatgggatcagtctaacgtcttgatttggaaaatctgtttttaaaatactgtgcttcttaccacaaaaggttgctgtgaagagttgttggtcagggcttatactgcaaacaacagaaaccagcaatggaggatttaaacaaaaaagaaatctatggacaggattctgggtgattcctaggctcctggggaaggctggagaaccctgctcagttggttggaaattggacaaaatttacttcgcagtgacagcactgtatcttcacttagaaataaattgcctttttcttcttttttcaaacataggttatatatttggggagaaccccagaagaagcatatagaatattaatctttggagagacatcctatattcctttcaggtaaatataagaatgatgtggtagattcaggtaatcagatccttgccagaaatatcttgatagttrtttctgaaaaaagaagatctggtaaatagtcattttaggatgagcgcaaataacaccacagatctgggtttttccacagtgacactgttgacgttttgtcatggaggctatcttgtgcrtygtagcatgtttagtggcctccgtggcttctgcccactagatgctggtaaaatccccacacccactctaattgtcaaaactcagaatgtcttcagacattgccatatatccctgtaagtgaccttgggggatggagagcaaaatctccctacgctgagaactactgccattgatgaaaactaagctttggctgggcacagtggctcatgcctgtaatcccagcatattggaatgccaaggtggaatgattgcgtgagcccaggagttccagaccagcctcggcaacaaagacagaccccatctctataaaaaaattttaaaaaaaattagccaggcgtggttgcacatgcctgtagtcccagctacttgggagactgaggctggaggattgtttgagcctaggagttcgagggtgcagtgagtgagctatggtcataccacagcactcaagcctgggcaatagagagataacttgtctcaaaaaaaaaaaaaaaaaaaaaaaaaaagcaaaccccaaaacctaggctttgtatcaggtgagaatcctgggttattgtactcaaaactaccactgaggagtgtggttcctgagaagttaaraaacgttcccaataatcagtagttactttctgggaccaaaatgaaccccttttttctggggacacagtcagtagagacagtcgataaggttgctaatgcagtaccacttccagaaaaaccagtcaagtcactgtgttccagaggtggtagttagtgatgtctacaggaatggatgacatcatctcaaacttagcatgcgattgtgttgaagatatttctagaagactagtgcttaaatcaagttctaaaaatttttctgctcgtttatcaaaatacttgacttagctctatagtttaaatacttgtatggtacttaatgggtaataaatgtatgaaataattttactcattgaagactttgatattttcaaaaactgcttgttcttccattcacaaattaataataactattgcttattagttcattgttcaaactaattagttcgttagtttatcgtattaggattgttacataaaccacaaatgcctgattttgaatgtatggccctaactttaaaaaagggagtttgtgaatctgactttattgtagatgagccttgggatgggtatttctaattattggcagaatctccctttcaaataactttataggcctgcctgtggacttactccatgaaataacaatttgtcagggcagtctgaagacttcagtaatacgctgcatgaaaaattgtgaaaatctgtgattgagcaaattagaattggcttgaacccagtatcatccctttctgctagctcatggctcatcttaagtattcttttatttgaggtgggtaggaagggaagagggggaaataaagatcattttctaagctggaaaattcttctcaacctataacataatagcaaccacattcttcctttaaaagaaatgcttgtatttttggtcttgagtcacaggcaccttggtcatctcttgatgtagtgacatttgttctatagaactcttctttataatggtaatcttttgtgatgccactcttagatttacagcacaaggtcctgaaataggaacatgctcacacatttcgcactgtgcaatgaaggatccatggaacactgttgatgtgaaaaaagacgttttgagttaatttaaatacaggtgccaaaaacagaataagcattgcttactgccttgctatgtttcaaattattaaagtttggcactgagaaatgaagttagttccttttggtcccaggagcatcagtcagtaattctccaaaaggcaagacttagctagaaaccattcagctttgtggaatttgaatctcttctattgtagatactaggtatttgatttatctaaacagtgtttctttctttttttttttttagacggagtcttgctctgtcgctaagctggagtgcagtggtgcaatctggactcactgcaacctctgcctcccaagttcaagcgattcttctgcctcagcctcccgagtagctaggactacaggcgtgtgccaccacgcctggctaatttttgtatttttagtagagaatggggtttcaccatgttggccaggatgtcttgatctcttgacctcatgatccgcccgcctcagcctcccaaagtgctgggatttcataaagtgtggcctgtgaactggtgccgatctgtgacattttgttaccagcctgtgttgagataaatacagaagttgagaataagattttagaaacatttatagttatcgaatagagcaattttatgtctgtagaatcaaatagtagaagaaatttgagcttgtattttgttttttttcccctttcatttttctagtaatttattttattcacaaaaataagattattgcattactggatatgtaatagtatagtactattgcatttcatatttatcttacaaaagtgtcaacctgtgatagacttagtttttaaatttagtgcttcttcacatagtgttctatagaacttatcaattagaaagtagtccaatcagaattaataaagcctgataatattttgatagaaatgacattatattctttgtatcttgccactttaagtacatagaataaatatgaccaacaaagtattgctaacacgacgttgtgcaagaatggcattcatttatagcaaataagttcttttatgttctgtagcaatgttttatttaattagatttaattcaacttagatagaattctctctctctcttttttttttttttaaagacagattcttgctctgtcacccaggctggagttcagtggcgcaatcttggctcactgcaacctctgcctcccaggttcagggaattctcatgtctcagcctctagagcagatgccaccatgcccggctaatttttgtatttttagtagagatggggtttcactaagttgcccaggctggtctcaaccccctggcctgaagtgatccgcctaccttggcctcccaaagtgctgggattacaggggtgagccactgtgcccagccttctttaaccactgagttttaaagtgtgtgtgtatgtatgtgtgtgtgtatgtgtgtatatgatttcttattgagttatattaaatatttctctgtgtctggtctgcataattaaatagtataaaatatagtttaattttttttaaatatcataggatcattgttatgaacagtgtgtatttctgttctctggtattatctgttataatactctttgcttcttagttgtttttgtgtgtgtggggcttgcctctgcttcctgttttcttgagaggtagtattgtatatttgttaatagcttgacttgacatcagacagatgggagtcttgctgtcagctctgctactgacatctctgtggtcctttacagatttgagccttggtctcctagtctttaaacagaaacaataggctgggcgctgtggctcacgcctgtaatcctagcactttgggaggctgaggtgggcagatcacaaggtcaggagatcgagaccatcctggctaacacggtgaaaccccgtctctactaaaaatacaaaaaattagccaggcgtggtggcgggcgcctatagtcccagctactcaggaggctgaggcaggagaatgctgtgaacccgggaggcagagcttgcattgagctgagatggtgccactgcactccagcctgggcaacagagcgaggctccatctcaaaaaaaaaacagaaacagaaacaataatacattctctctcaaggagttgtgaggatgaagtgacatcctgcatataaaacacttggtataggctgggcatggtggctcatgcctataattccagcacttcggaaggctgaggcaggaggatagcttgaggccaggatttggaagatcagccttgcagcatagcaagaccatttctctttggggaaaaaaaaattagctgggcagggtggcatgtgtctgtagtcctagctacttgggagactaaggcaggaggatccctcaagcctaggaggcttcagtgagctttcattatgccactgcactcagcctgcacaacagaacaagaccgtatctttttttttttttttaagacagactctcgctctgtcacccaggctggagtgcattggtgtgatctcggctcactgcagcctccacctcctgggttcaagcgattctcctgcctcagcctcctgagtagctgggattacaggtgcccgccaccacacctggctaattttttgtatttttagtagagatggggttttgccatgttggccaggctggtcttgaactcccgacctcaggtgatccaccagcctcggcttcccagagtgctggaattacaggcatgagccactgtgcctggccaagaccctgtctcttaaaaaaaaaacaaacacttgatatagtacctggcctttaactaatatttgttaaatattccaaccttcccccttttaagttgactgtcatttagctacttttttttgagtcggagtcttgctctgtcgcccaggctggagtgcagtggcacgatcttggctcacggcaagctccgcctcctgggttcacgccattctcctgcctcagcctcccaagtagctgggactacaggcgcctgccaccacgcccagctaattttttgtatttttagtagagacggggtttcactgtgttagccaggatggtctcaatctcctgacctcatgatcctcccgcctcaggttcccaaagtgctgggattacaggcatgagccaccgagcccggccatttacctacatgtttaaaaatcactgtcgtggccgggcgcggtggctcacgcctgtaatcctgccactttgggaggctgaggcaagtggatcacctgaggtcaggagttcaagatgagcctggccaacgtggtaaaaccctgtctctactaaaaatacaaaaattagcagggcawggtggtgcacacctgtaatcccagctacttgggaggctgaggcacgagaatcacttcaacctgagaggcggagattgcagtgagctgagatcgtgtcattgcactccagcctgggcgacaagagcgaaactccgtccccaccccactccccgcaaaaaaaaaaaaaaattctctgtctcctagatttccctcccacccctttccagtcagtcatcacccccagctaatcattgctctgacttctaccactatcagttttgcttgcctttgaacttgatattactggtatgcattttggggagctgtcaactggatttcacatatgtaatgtctatgagatttacctgtgttgtggaaggtatcagtagttcatccttttttattccttttgtagcattccagtctatgagtataccacaatttatttgcctgtggtccttttgatggatatttgggtcattcgtagtttttggccgtggtgaatacgagctgttacgaaagctgccattctttaaaactagtatttgacattgttgtgcagtttctaagcagtgcccatttattgattcttacgtgttttccaaatttgttaaatgatcttggtgacaaggatccctccccactgcccaaggcttataaactgagcctcagagttgctgttctgcctattggaagaaggctgaatgcaaggtgggaggaagatgtgatgtgggtgtgtctaaaattggaggtgctaatgaaatacacttgagtgagcaaagattcttgtcgtatattcagattctatgatgtatgaggcaggacttcagcagggcccagatgaaagcgtgtgaaatcatcacagattggagcggggctgtgccccacagtaggttctcaaaaaaaaaaaaaaagcattgaagaaatttgccaaaatgtcacagagactgaatcaacatgtctttaacttgattggaaaagattatcagtaggttaagaagataatcaagccaggcgcagtggctcacgcctataatcccagcactttggaaggccaaggtaggtggatcacgaggtcaggagattgagaccatcctggctaacacagtgaaactccatctctactgaaaatacaaaaaaattagctgggcgtggtggcaggcgcctgtagtcccagttatttgggaggctgaggcaggagaatgttgtgaacccaggaggtggagcttacagtgagccaagatcgcgccactgcactcactccagggggagactgtcaaaaaaaaaaaaaaaaaagaaaataatcatactccttcacagagaagacatggttaaaatcattgggatccaacttgagggtttaccccatttccattgataattttgatttgatttaggctaaagtacttcattttcctgccttagtttctctacctaaatgggttctttattccatgaacaccctatttctacaaaaccaggatttgtgttgatttgtaggttggtgattcataaacttgaacacaatcacagacaactagaggacctgttaagacacaaattacctggccctatcccgagaactttgattcagtagatgtggggtagccctgagaatttgcatttctaacaggtggggtggtcctggtgctgctggcctggggaccactgctggaagtccttttgtttttttctttctgaatattgccaataaagtgttggtaaaatcgtggccttttaggttaaagactttttctaggatgtggaagagaagtttttcacttcagaaccttacagaacaaaaatggtgtgttctaagaccttgtgttggctgaacgcagtggctcacacctgtaatcccagcactttgggaggctgaggcaggcagagtgcttgagctcaggagttcgagaccagcctgggcaacatggtgaaaccccaactctaccaaaaaatacgaaaacttagccaggcctggtggtgtgcacctttggtcccagctactccagaggctgaggtgggaggatcgctttagcccaggaggtcaaggctgcagtgagccatgattgcaccactgcactccagcctgggcaacatagtgagaccgtgtctcaaaaaaagaaaacaagaccctgcattctgtcctcatgaaggttcgcatagctcagtaattctaagcagctcagtcagtaacattgaagacgattttagctaaaaaggatgccttttcttgccctcattgctgtagttttggcccttaaggtttgagcaagaattaaaagtttaaaatgtggtttagtttttattctaacatttgtggaatattcattttccccttttaagttaatgtataacttatagtttttaacaaaaacactaatctttttttattttattttatttttttgagatgggagtctcgctctgtcaccaggctggagtgcagtggcgtgcgatcttggctcattgcaacctctgcctcccaggttcaagtgattctccttcctcagcctcccgggtagctgggactacaggtgcgcgccaccatgcccggctaatttttatgtttttagtagagacagggtttcaccatgttggccaggatggtctcaatctcttgacctcgtgatccacctgcctcggcctcccaaagtgctgggattacaggcgtgagccaccacgcccggcctcaaaaacactaatcttaagtgtacagtagtaaggttttacatgtatttatgtaactaccacacagtaagaaatattacagtgtgaagacccaaataaggtggggaattagtgatagctccaccagcaaccctgtttccccaggagcaaatgagtaccattcagataggcacagtttttctgcatgcctagcttaatcataattaaattaatttttatgttgcctaattccagaagatttcatcttgtaatggctcaaggtagccaaaaaggagaagcagggtaggggtcggggtgccttatttctctgggtaaaaccttacttgatattaagagatttgtataggaagatttactggtatgtattgatgcagtgtttggctggagttgtctgtaaagtaatataagcactttcccaaaactagagtgatcctgtggaaggtagttgacttgttagttcctgtggttttattggtattactgtcctttaaaaatcagaaagaaggtagggcacagctgtttacacctgtaatctcaacacttcgggaggccaaaaaggtgagaagactgcttgaggctagaagttttttttttttttgagacgagtctcgagtctcgctctgtcacccaggctggagtgcaatggcgcaagctccgctcactgcaagctccgcctccgggttcacgccattctcctgcctcagcctcggagtagctgggactacaggtgccccccaccacgcccggctcatttttcgtatttttagtagagacagggtttcaccgtgttagccaggaagatctcgatctcctcaccttgtgatccacttgcctcggcctcgcaaagtggtgggattacaggcgttagccactgtgcccagccagttgtgtgggtgttttgggcttgttgttttttgttttttgttttttgagatagagtctcactttgtcgcccaggctggagtgcagtggcatgatctcggctcactgcaacctccatctctcttgttcaagcaattctctgccttagcctcctgagtagctgggattacaggcgcccaccaccgtgcctggctaatttttgtatttttagtagagacagggtttcatcatcttagccaggctggtcttgaactcctgacctcgtgatccacctgcctcggcctccctaagtgctgggattacatgcctgagccactgcgcccggcagaggccgggagtttaagaccagccttggtatcataatgagactccatctctaccttaaaaaaaaaaaaaaaagttagctagatgcggtgatacatgcctgtggtccttgctactggggacactgaggtgggaggatcacttaaacccaggagtttgaggctgcagtgagctgcactgcaccccaacatgggcaacagggcaagacgttatctctataaaaaagtttaaaaaaaaaacccagaagttacccagttaaatgggtaaaagtctttaggataacgatagcaacaaaatgcttatgaccttctacctaatattttaaatgtgaccttgatttctcagtatttctgtcatacttggttggagacacacacacacagacagacacacgtataaatagacacacatacacacatatgtttattacaggatcaaaaagcagtctttcccagtaagattttcatacggtattttccagtttaaagaaaaaattcaaatgctttgcccctttgggggagagataggtattgatttgttgaattcaagaaggtggctcagctgttaaagccaaaaataatccagagagaacatttgaaatttaggaagtggtcattattgatccaggcccataaaacagtacctattggaataggtagaaactgcagtgaaatttgtaattgatttatcttttatttaaaagtcaaaaggcgagatttttttcttcttgataatggttcagagtgtacatttgattttaaattctagtcacctttgtcttaggtaagtgtaattgcagaaaattaactgatctacattttattactcttgggtttcagagatgctgcctatggaagttgcaatttctacattacacttcttgactgttttcatgcagtaaagaaggtgagtgacatgtaggatgcacccagtgttgtgttgaggaactaacatgcggtccaagaaaactaggccttcttcccgagatctttttgttaktgtttcttccaagatgcctatggtgacagaggtgctccatttcccaactaatgtcagaatgagaccaaaccaggaaacagtttattctgaatttctgagtgcttctatgtatgagttgggggaaaagtcacttaagaaacagggaaaataagagttatacgattaggttctagatccagaattggttttgagtatattatgatctaaaagaacaaaagtaaagatgacttgtttactggtaagttctctttgatttgtatattctatatacctgattcctgccaataccattacaacagacgtaacacagtcactgtcaaacacttcatttttgttttgtcaggcgttcaatttctagttcaacagaatttgaatgcctcaattagtttgttatacagttttatgtgaaactaagtgggtcactgctgctttgtcaaactatttccaagtgattccttgggtcataaccagggctgctgtgttgattccaggggacaccctccctatcacgttctacgtgaacagggtcccctggggtcacacagtgcagcaagtcctggtattaatgtcaggacagcaggagaaactagaatggtaaatcagtagcccatggatcaaataagcctttgacagcatttttctgtaacttgtgcttttagagccaaaaggaacccaggtttactttcttgtataatgaaacatggtggcttgctgggaattgtgacagacatgtcttaaaacgagaggactaatcagcatacaaattcagagactaattgatatacttttttccctgtatcaatcaatgaggtatgggcacattgtttggatttgagcccagtgactgtgggatatggagctgattggggtagttgccatgagctctgaggcggctccatgggccctcagtgtgggcaggtatggggcactggtggaaatcaggagaccaaagggcaacaggtgtaaatggtaccttctggttgcagttgcagcccctgccaggtgggctcatgcaggcaggcacactcacctttaaaaagagaaaagtaaagctttgaggggtttggaaatgatctattataacaccatatggcagcttctattattattttttggcttttttttttttaattgggtattgcacccaaagtcaattagctggtacgataggtcaaagattgccatttgcatactatattttgggtttttttaaaattaaattttcattttttctgctatgctcagctaatttttatattttttgtggagatgaggtctcactatgttgcctaggctggtctcaaactcctgagctcaagcgatccactcaccttggcctcccaaagtgctgggattacaggcgtgcaccaccgcacccagccactatatttagttttatttaagggtcactatcttctgatttgcagtgtaagcattttttatttgtgactgattttgaatattgcatatatgaagaaacatgcatcaatgtaattatgttttcagtgtgattcacttccaataagatcacctcatgaaattcaaaggaaaataggaattccttataaactacttttttttattgtttcattctattagaaatagctgtagtccaaaatcatgaaatatattgcagtcaaggaaataaattttgtgattgacttagtcttgggattagtgtttaaataactatataaaatgaagacctttttagttgatattctagccttcttattttacatttgtatttcagtagtttacttttgaaaactgggtgtacaaaagccccctctttgaaccaagaataccttgtggatcagcaattcttgcttccctcctgtttggctcagggatcagcagccaggaggatatttctcagaggctgctaggtctgtttgtccttgtctcagaaaatagacactctgcttattttggttatcatactctgcctgctatcayacagagtaaggctataggataggacagaaattttttttgttttattcctatggaaagaatatcttttttttcctcaaaagttttgattttagtgttgatgtcagagctgtttactttagggaacattgattaaagactgttcggaagaatttgaaaatgaagatatggatgaagtatgagggttttgtttgggataaactagcacatggattctctcctctttcttatcgatgtagagaccattgggttgtgcattatatttgaatcctaaacttctgaattttcagccaggggtggtagtgatctggtaagagaagaggattactttcagggcgtgattatttaacaatacatggataggatgactggtgaatgaaaataaaaaagcacatctcacaaacaaaatccaaacaaaacacaacaaacttattacatatagttataattaatttccatataaaagaagcacttagaagacgccgcccacttcctttgaaagctgttcagtggaaagtaatctgatcatgrcaatactttcttgggggkcccctgatatttagtattctgaaattggataggaaactgttttcttatttgcatccttgttcttaaaagctttcttttggattttaggcaatgcagtatggcttccttaatttcaactcatttaaccttgatgaatatgaacactatgaagtaagtcttcaaggatcatgttttcaactcttcctccccccgcccagctttattgaggggaataattgacaaataaaacttatatatacttaagatgtacaaagtaatgttttgatatatgtatacaccatgaaatgattacctaatyaagctaattaacatattcatcacctcacataatttagtcttttggcgtgtgtgatgagaatacctgagatgtactctagcagatttcaagcatacagtacacacattagatctccagaatttacttatcctctgatggtttgtactctgaccaaaatttctctgcctgtttttaatttttctttttttaaattgaaaaaaaaagagagagaccaagtctcgctctgttacctaggctgaagtgcagtggtatacatggctcactgcagccttgaacttctgggattaaatgatcctctctcttcagcctcccaagtagctggaatcacaggtatgtaccaccatgccaggctaattttttaatttttatttttgtagagatggggtttcactttgttgcccaggctagagttgaactcctggcctcaagcacttctcccaccttggcctcccaaagtgctaggatcacagatgtgtgccactgtgcacggccctgtttttagctttcttaatcacccatttcacttacagaagcaatattcttgttttgttttagacgtgtatagagtgaaaaaaagtcaagtcttcatcttcttatccctatttctcctgtcccaattctcagtgggaatttctgcatttgatgcacaattctagagtgaatgagtgtgccccgtgtgttctttatactgtttagtttaaatgtattttagtattgatggctgtcacacagtgattgagatgcttttaaaacccttagcatagaataagatgagatgaatagtcattatacacctaattatctctggaaaatatctttgtttttgccataaccttcggtttgtcaggacacttctggttgcaagttacagaaagtaaacacaaatagcttaaataaaaaaggaaaaatctgccaggcgcagtggctcatgcctgtaatcctagcactttgggaggcctagaggggcagattgcctgagctcaggagtttgagatcagcctgggcaacatggtgaaacctcatctctaaaatacaaaaagttagccaggcgtggtggtgggcgcctgtagtcccagctactcaggaggctgaggcaggagaatcacttgaacccgggaggcagaggttgccgtgagccaagatcaccccactgcactccagcctgggtgacagagcaagattctgtctcaaaaaaaagggaaaaatttactggattacataaattaaaagtccaggaataggattggcttctagcatgccccttcaggtgctcagacacttaatcagaaattggacttgaagttagttttattctcaggccagccttctccagtagtgataaagatggccaccagcaactttgacctgccagtttggcaaaatgatcagaaaagtgtaatcttagctccatcagaaggcccaggaatgcctctcactggcctgacttacgtcatgtgcccatctctgcaccagcctgtgttctttggcagggcagggctaaggaatactctggccagccttagttctctggccatcccaggagcctggggcatagggtcagccccatcaaaccagccggaccaaaaaaaaatttattttctaacagttttattttattttatttttctttctttcttttttagagacagggtctcactctgctgcccaggctggagtgcagtggtgcgatcttggctcactgcattctctctcccaggttcaagtgatcctcccacctcagcctcccagtaacggggactacaggcacgtgccaccatgcccagctaattttgtaatttttttgtagagatgggatttcgccatgtttcccagcctggtcacaaactcctgcactcaagggatctacctgcctcagtctcccaaagtgctgggattacagatgtaagccacggcacccaaccacacaaaatttcttaaaaacataggacagggccagggagagataagccaggcaaaaccacaggtgtgttctatgttttttaacatagtatatatattttaaaaagaataaataatttgattctacagctttatcctccaaatagggaatgagtaagatactgtgctaaagcccttttcagcccagagtagttgtagcctcctgtcttcttaccctgctgtagttaccttgagcagacttgctccccagcactggggagatgattcctcaaacagcagcacttcatgtggcagcatcttgaatcctcagagaattctttttcacaacgtccaaagtaaatattatttcaaactcttacgtttaactgaactgttttttcaatttcagttaataatgacactcagttgtttctgtgatgtaccaaagatgtaagaatacattgtaggattcattagggccaaccctgtctttacttctctgatagcagtccatttctaaagtacaacgtacatttaactagcaccttaaacttacagaatatagctaagttattaacaccttttttgcgcttgtccttaaaacattaaacatttgaaacaagttactttgtctatgtaagcaaaactgctaaaaacactagttggtatttgttccttttgtagtgatgcctttgtgtgctattaatgaataatataggcactaagtaactcccctgttactactgtagagattggagggtctgggctggggggtagcaggggcacaccacaaacgtcttcacctccatgaagctgtgtggtgacacagggaactgtttaggttcccacacaccagttcagttattatagtgtatttagaaatttggggatagtgtcattcattgattctacaatgcccattttttcctatttcagctcctctgaattcaggatgtatcttaattaatggcatcagcaattcagtgaaatctagttgttgccaacaactgatcacgggtttgttatttaaaagtccagatttctgatttcactttaaaatcagaatatctggcaacagctgccctcattcctgctttgacctttccttttctttttatttaaagagagagggtctcactgtgttgccctggctggactcaaattcctgggcttaagtgatccttctgcctcagcctcccaagtagctaggactacaggtgcatgccactgcacccggctgtttagacctttgtattatggaacatgggctgactgattccccatgttgatcattaagtccagtaaactggtttgggattacctgcttggtccctgtagatattcaagaaactctgttattttttactcatttttaggtacacgtagaaacaccccaatttcaaagctaatttatctgttgtttttaatcacgagtcctctccttctgcactatcaagtgtcttctacttcctgcttaagtctctgttgtccatttcattaagacagaagtttctattattgttaaatttgaactgtatctatgttataatagtaatggtaactcaatccaaaggacctaataacaggaagtaacatgtcttacatatcagtttatatttgtttttttgtagggacatactgtgatcttggtatacttgtaattttttagtttcctggtcggttcagtgcatttatttatttatttttttaatttttgttttttgagacagagtttcgctcttgttgcccaggctggagtgcaatggcacaatctcggctcactacaacttccgcctcctgggttcaagcaattctcctgcctcagcctcccgagtagctgggattacaggcatgcgccaccatgcctggctaattttgtagtttttagtagaggcaggatttctccatgttggtcaggctgatcacgaacaaatgaactttttaaattggttgccttattaaatagttaggaagatagtggaaagatatatctctgtaagtaggtaagtaagtaaatattgggaagccagaaacctaagtagatagtttttccccctttattcgtggagtcaagattgctcatgttggaagccagttagtcattcaggaaaacagggaagttcccagattccttatactggaaaagtttgcttgctttcttattaattagcagcaactataatgagaattgattcagataaaataaccaaatagtatatttgtatggcagcagtcagctctgtattccaagggctgataccctagcaatgaaacactgttaaaagaagatgattaggaacaggatatacgtccattccctagatatacttatagcagggcaaattgagattcctgtctcatggcaatttgtaaacagcttttccgctaaagcaaatgagtttgaagtccttcagagactcagtcttgagtagagaggttrtggggagaatacatttaaaaacgaattgtgctggtcttccccttgcagaaagcagaaaatggagatttaaattggataataccagaccgatttattgccttctgtggacctcattcaagagccagacttgaaagtggtatgtgaaattatggcattaatctcattttgktattgaaaatatcyatcctatattttcttttgaaagagttacaccaagcttgaccaagtgttaattattatttaagcatacttgrtcacttcagtagatcattctgactggattttaactttcttttcttttgttttttacagttataatcaaattggtatttaattcccagtccagatactgtttccgttcagttacaggtgaaactattagccattgttttctttatgtgttttataagatctggtgcatttctttatgtaggttaccaccaacattctcctgagacttatattcaatattttaagaatcacaatgttactaccattattcgtctgaataaaaggatgtatgatgccaaacgctttacggatgctggcttcgatcaccatgatcttttctttgcggatggcagcacccctactgatgccattgtcaaagaattcctagatayctgtgaaaatgctgagggtgccattgcagtacattgcaaaggtatgtttctaggggtggttaaagaatagtatacagtatgagtatatgaatatgtagaaacagaccrtattcatttagtttatgtgtcagaacatgaaactgcctttatttttagagtgccgtgaaacctttgatttcagatgaaaagtatagtaacttattttcataagtaattctacaaatacatcacattgaaatgcatttatttattcatcaaatatttattgggtgcatcctatataattctaggatacatcaatgagtagcgtagactgtaagagcctgtcttaatggaaactatattcttaacaagttgctctgttttcagcaattgtaacagtgcctggcacttaatagatattttttgaataaatgaatgactatacaataataaatggtatgaagatagtaggatttatttaactctcttgttagttaattaagaaacaagaaatatagttttgttacaaaaatccaatattggaaaaaaagctcagcaagccttggggaaagggggagactgatctccagagttactgctgtatttgtagttttaaatataatggcaaaacatcacatttcagtttttattgaaaaattacatggcatacaaagaaacaggaaagtatagcctattcaaagggaagaaataaatccaggccgggcatggtggctcacgcctataatcccagcactttgggaggccatggcgggcggatcgcctgaggtcaggagtttgagaccagcctggccaaaatagtgaaaccctgtctctactaaaaatacaaaaaaattagctgggtgtggtgacggatacctgtaatcccagctactttggaggctgaggcacaaaaatcacttgaacccggaaggcagaggttgcaatgagctgagatcatgccactgcactccagcctggccaatagacagaacaaaaaaaagaagaagaaataaatccacagaagctatccctgagaaagatcaaattgtggacttagtaggcaaaaaattttaaataaccatcttaaagatacccaagagttaaaagaatatgtgggaaaagtcaaggaaacgatttatgaagaaatactaatatcagttataaaaagaacacataaaagggaaccaaaaggaaattctggaaatgtactaaaactgagatgaaaaattcactggagggattcaaaagcatatttgagcaggcagaagaatcagtgcgtgtgaagctagaatcattaaagaattagcaagtctgaggaacagaaagaataaagagcataacataaatgaacagaatttaagggatccctgagacacacccaagtagaccaagatacagatcgtgggagttccagagggagaagagaagtaaaggagcagacagatgatttggctgaaaactccccagatttgatatatgcaggaatatccaagaagctcaacaaactccaagcaggataaactcagaggcccatgtgaacatgcattataatcaagctataatgccacagacagtcttgaaagcagcaagagagaagtgacctaccacatacaggggataccactgagattgtcagcagatctctcatcagaaacattgcaggccagaaggcagtgggttgatatattcaaaatgcataagtgagggaaaacctgttaagaattctacatctggcaaaactccttcaaaaataatggaaaaattaagactttgcccaggcaatcagtttgcctttctgataaaggcaaatacatggaccattataaaagctagtattatcgtaacgagataatttgtaaaatattattactgtaacttgtaaatattgtaacttgcaaaaaacaaatagaaaatctgaatagacccctaactagtaaggggattaagtagtccaaagcctcctgacaaagcaaaaccttggatataataacatcgccagtaaattctaccaaacacttaaaagggagtttttaatcactagatctgacttgcaagaaactctaaagggggagtcttttaggttgaaatgaaggcacactagacagtaacacacagccatttgagaagaggaaataaagatttctgataaaggcaaatacaaggaccactataaaagctagttttattgtaacaagataatttgtaaaatattattactgtaacttgttattgtaacttgcaaatattataatatgtaaattattgtaatttgtaaaataatttgtcgtttgcaagtagtataatttttgtgtattattatatacaaaaattgcaagtagtatattattgtaatttataaaatagagagtagaaaaccaatagagaaaatgaacaaaaccaagggttggttctttaagaagaataacaaaaatgataaacctttagctagaatgatgaagtataaaaggaagaagactcaaattactaaaattagaaatraaaatggcattaccactgatactacagaaataaagctgatcagtacgtaaaaatgatcagtattgtaggacaacaaattggatagtctacatgaaatggacaaattcctagaaaaacaaaacaccagaactaaatcataaagaaatagaaaatctgaacagacccctaactaataaggagattaagtaatccaaaacctcctgagaaagcaaaaccctggacatgatagcatcaccagtaaattctaccaaacacttaaaaaactaaaaccagtccttctcaaactcttctgaaaatttgaggaaaaaggaacactttctaactcaataaggtcagcattaccctgataccaaaaacaaaaagacactataagataactaactataggccagtatcccttacgaacatcgatgtgaaaaccttgaacaaaatactagccaatggaattcagcagcatatttaaaaggattgtgtgccatgaccaagtaggatttatcccatgattacaagagtggttcaacatatgaaaatcaatcagtgtgatataccacgttaaggacaaaaaccatacgatcatctctgcacaaaaagcgtctgacaaaagtcattacccttttgtgataaaaacacagtacaaactaggtatagaaggagattacctcaacataagaaccgtatgtgaaaagcccacagctaacatcatactcaatggtgaaagactgaaagcttttcctctaagctcatgaagaagacaaggaggcttggttttgtggcttctatttaacatggtaatggaagttctagccaaaggaagtaagcaaaaaaaaaaaaaatcgaaattagacagggggaagtaaaattatctttttgcagatgatatgacttatatgtattatagaaaaccctgggccaggtgcaatggctcttggctgtaatcctagcactttgggaggccgaggtgggtagattgcctgagctcagaagtttgagaccagcctgggcaacacggtgaaaccccgcctctactaaaataccaaaaaaaaaaaaaaaaaaaattagccgggcgtggcgcatgctaaggcaggagaattgcgtgaatctgggaggtggaggttgcagtgagctgagatctcgccactgcactccagcctgggggacagagcaagactctgtctccaaaaaaaaaaaaacagagagagaaccctcaagattacgcacacacacacagagcccctgctagaattaataaatgagttcagcaaagaagtagcagcatatacaatcaacaggcaaaaatcccttgtttctaagccctgacaataaaaatataaaaaagaaactaagaatacagtttcatttataatagcatcaagaagaatcaaatattggggaattaaccaaggagatgaaagatttgtataaaacatttttgaggaaaattaaagaagatgtaattaaatgtaatgacatcacatttgtgcactgggtgacttaatattgttaacatgtcagtattgcccgaagggatatacagattcaatgcaagcctgtcaaaatttcaacatttcttgcaaaaatagaaaaatgattctgaaattcatttggaatctcaagggatgccaaatggccaaaacaatcttgagaaagaataaaaaggttggaggactcacttcctggtttaaaacttcatacaggctgggcatggtagcttaacacctgtaatcccagtactttgggaggctgagacagaaggattgcttgagcccaggagtttaagaccaccctggacagcatggcaaaaccccatctctactaaaaaatacaaaaattaactgggtgtggtggtgtttacctgtagtcccagctactcgggaagcttagatagcaggatcccttgaacctgcgaggttgaggcggcagtgagccatgattgtgccattgcattccagcctgggtgacgtagtgagatcccgtctcaaaaaaaaaaaaaaaaaaaggcttagtacaaagctacatcaatcaagattgtgtggtactggcataaagacagatacatagaccagtgataggatagagagctcagaaataaatccttgtgtatatggtcaaatgacattcaagaaggatacagaaaccactcaatggggaaaggacagtcttttcaacaaatggtgctgggaaaacctgatatccacatgtaaaagaatgaaattgggcccttacataacaccatatacaaaaattaaaatggatcaaggacctaaatataggacttaaaactataaaactcttagaggaaaacagagggtgaaaacttcatgacattagatttggcagtaatatgacaccaaaggcactgacaatgaaagaacagacaaatcggactatataaaattttaaaacttttgtgcatcaaagtatactatcagcagagtaacaaggtaacccatggattgggagaaaatatttgcaaatcacttctgataagggattaacatccagaagatatagagaaaacgcctaaaaacaacaacaaaacccagttcataaatgggaagaggacttgaatacacctttctccaaagatataaaatggccagtgagcacaagtaaagttctcagcatttttgacttatagggaaagtcaaatcacaaccacagtgagataccactttatacccattgggatggctgttatctaaaagaacaaaaacatcaccaccagaaaattacaagtgtggagatgtggagaaaattagaagccttgtgtactgctagtgggagtataaaacaatgcagctgctatggaaaatggtgtggcagttcctgaaaaaattaacgtcattcagcagttccatctctggttatatgctcagaaacaattgacagcagggatatgaacagatatttttacacccatgttgtagcagcattcttcttcttcttctttttttttcttttttttgagatggactttcactctgtttcccagactagagtgctgtggtgcaatcttggctcactgcaacctctgccacctgggttcaagtgattctcctgcctcagcctccagagtagctgggatgacaggcacgcaccatgacatccagctaatttttgtatttttagtagaaacagggtttcaccatgttggccaggctggtctcgaactcctgacctcaagtagtccacccgccttggcctcccaaagttctgagattacaggtgtgagccaccacgcccggccagcagcattactctgaatagccaaaaggtggaagcaatccaggtttccatcagaggaaggctaaagaaatggctaaagaaaatgtgctatatcatacaacagaatattatgcatctttagaaatgaagaaaattctgacacatgtactgccacatggatgaaccttaaagatattaggccaatttaggtttgccagtcagaaaaggacagatattgtatgaatccagttgtatgagatacttggggtaagagaaagtagattggtggttgccagggcctgaggggaggcagggattggtagttattgtttaatgggtccagagttggctgggcacggtggctcacgcctgtaatcccagcactttgggaggctgaggtgggcggatcacgaggtcaggagatcaagaccatcctggctaacacggtgaaaccccatctctactaaaaatacaaagaattagccaggcttggtggtgggcgcctgtagtcccagttactcgggagtctgaggcaggagaagggcgtgaacccgggaggtggagcttgcggtgagctgagattgcgccattgcactccggcctgggcgacagagcaagactccatctcaaaaaaataaataaataaaaataataaaaaataaaaatgggtccagagtttccgttttgtaagatgaaatacgttctgaagatggatggtggtaatgtttgtacaacaatgtgaatgtacttaatgctactgagctgtacacataaaaagtggttaaaatgatattcagaaacttacactaaggaaatacaagtttccgaattaaccaatacagaatttttttgtttttgtttttgagacggagtcttgctctgtcgcctaggctggagtgcagtggcacgatctcagctcactgcaacctctgcctcccaggttcacgccattctcctgcctcagcctccccagtagctgggactacaggcgcccgccaccgcgcccggctaattttttgtatttttactagagacggggtttcactgtgttagccaggatggtcttgatctcttgtgatccacctgcctcggcctcccaaagtgctgggattacaggtgtaagccaccgcacccggccccaatacagaatttaaaataactgtcttaaacatgttcagtgagctaaaasagaattcagacaactaaatgaaatcaggaaaatgatgcctgaagaaaaatggtaaattttatgtatattttactccaatttttaaacataattaaaacaaaagccagcattgcttatttcattttttaattataaaaagcagttgaaggaattcttcagcaaggtccttttgcaccccaaccccatcacacacccgacatttggcaacctgcagagaccttttttgggggttgggtaccacgggcatctggtgggtagagatcagcgatgctgctaaacatcctacagcgcacaggacagctcctcactataaataattatccagcctcaaatgttagtactgctgaggttgagataccctgaaatagaatgatgaccaattaaaagcctagagaggatcttatttgattgcatctttgtttagggaagaaaaatgatgacagtatgaaaattgggctgtacagtgaaaattgagattcattaagaggtatattaatctgctggggcatatcaccaactgggtggcttaaacaacagaagttaattctctcacagttctggaggctagaagtctaagggcaaggcactggcagggatgttttctggggaggcctctctcctcggcttgcagtgcagatgtctgtcatctctgagtcttctcatggtttgcacttaactcctgccgtctctttcttttatttttttgagatggagtctcgctctgtctcccaggctggagtaaagtggcgcgatctcagctcactgcaagctccgcctcccgggttcacgccattctcctgcctcagcctcccgagtagctgggactacaggtgcctgccaccacgcccggctaattttttgtattttttagtagagacagggtttcactgtgttagccaggatggtctcaatctcctgacctcatgatctgccctcctcggcctcccaaactgctgggattacaggtgtgagccaccgcacccggcctatctcttttttttcttagaagtacaacagtcctattggattagggccccactctgtgaccttatttatttccgtaaaggccttatctgcaaatacagttgtattgggacttagaacaatatatggatttgggttaggggggacacaattcagttcattatattctgccatctggcccccctcaaatttatgtcccttcacttcaaaaatacattcaccccatctcaacagttctgaacatctcaattcattccggcatcaactccaagttcagagtctcatctaaatagcatccaactcaggtataggggagacttgaggtatgatccatcctgaggcataattcctcccagctgtgatgggatggtacaggcacaggatagacattaccattccaaaagggagaaaccagaagaaagagcttctaagcaagtccaaaacctagccaggcaaatcccattacatcttaaggctagagaatcatcctctttggctccacgctctgccctccaggccctctagggtagtggctttgtccctgagggctgtggtcagaggcagctgggtttgctgtaactaatagaggtggccctaccctgtgaaatcaaggagtaggcaggccttccctgagcttatatactctgtgtctcggtggcagtggcagcactgggggtctctaaattgcccttgggatcatccttccttttcttgaaggacaaagaatgtttgcatccaggtagctctgctgtcagaagtccaaaagccttactttattttattccatgtccatcccctttagtgcaagatgccagtgtctctgctggtataatcccatctcttgtccttgcttctgctgagatggctgattaagtctaggtaatctctttagagggggagtgtccagccacacccttgacttttctctctgtaacactcttattttttgcaatatggatagcctgagaattttctgactctagttcctgattccctgttgcttaacaatttcttctttaattcgtctttttccttttgcattttacagtaaccagtaaggagaaaccaggttgtatcttcaacactttccttacaaatctcccctgctaaatatgcaaggttgtcaatcacaaagccacttctccatttctatgtagttgttacagtgacccctatctcatgatccaaatctgtatttagggttctccagaaaaacaagcagtaggattttttttatatgtaggagatttattaaaaggaattggctcatgcaagtatggattctggtgagtccaaaatatgcagcgtgggccagcagcctggaaacatgggagagttgatggtgcagatgaaagccaaaggcagtctcttgctcaggaaagtcagggtttttgttctgcccaggtttttcagctaattggatggggcccatccacattatggagggaactgtgcttactgaaagctcaccaacttaaatgttaatctccaaagattcattccggattgacacataaaattaaccatcactggaggtaatgataatagtctagataagacaggccagcaccaatagaggtttaaaaaaatctgagtgaaaatgggtattacagaccagaaaacataattggatgtgggagtaagtgcaaaattacaagcctttggttttgcaaagatggtggtaccgtttttctaaaatgcccagggcagaagacactgcacttactgagaatcattgctcagaaagtgattctccacctcggctacacatagaatcatctggaagattttaggaatctctgtgtccaagctatgctgcataccagttaaatctaaattcttggcgtaaggccaggcgtggtggctcaagtgtataataccagcattttaggaggccaaggcaggcggatcacctgaggtgaggtgagtttgagaccagcttggccaacatggtgaagccccgtctctactgaaaatacagacattagccggctgtggtggcacatggctgtaaatcccagctacttgggaggctgaggtaggagaattgcttgagcccaggaggtgaaggttgcagtgagctgagattgcatcattgcactccagcctgctgggcaacagagtgagactccgtctcaaaaataaatagataaatgaaacaaataataaatacattccggatgtgagaccgggcatcagtatttaaaaacctctctaggtgattccagagtgtaaccagccttgagaaccactattgaaagaagcagagtcatgagaagccttttaaaaaaattctgcctgcccaacaaaatcctggagtacatcagcccaagtttcatttctgtgcttctttattttcctagctggccttggtcgcacgggcactctgatagcctgctacatcatgaagcattacaggatgacagcagccgagaccattgcgtgggtcaggatctgcagacctggctcggtgattgggcctcagcagcagtttttggtgatgtaagtagtagcctacrtctgtagttcccagggaacatgtggggttggaatctgatggggagtggaatttcctttagtttccaayaacaacagataatctggtaggaagaagttgttcatgtatctttctggaaagctctattttgatgttatttaaatgctctaggaagcaaacmaacctctggctggaaggggactattttcgtcagaagttaaaggggcaggagaatggacaacacagagcagccttctccaaacttctctctggcgttgatgacatttccataaatggggtcgagaatcaagatcagcaagaacccgaaccggtaatcaagccgtttctgttgcgatgttgttactgctttaactgctattgagaacctgtcagggtatggagaaaaccgtaggtaaaataataaagcagctcttggatgattgtcagttttttatatttataaccctctctaggcactttttacccaaaatagtggaaacaaggttgtgtgtccataaaactatgttttacttactcagcaggtgcataaaaggttgtgaagtgagctcttcagccagatctacccctgcccctcacccctttttgccatttcacaacagctgatttaggaaagcaatcattctcaaatagagagcttttaacaaatcaaaggcttagggggtagcagtactactacattaagtggtagtaagtacactgagattttaaaaagagcgttttcaaacttgaaagcccattaaccctcttcactgttgatgtgttttctaacaagagtgctgctgtgttgtctctgaaagtcaactttggctgtcttaaaatgtcacctgaagcttgattgtgaaagggaaaaatattctagagcttgcagaaacttggactgtgttcatgtggataaattgctgctctgctgtactgcattaataagtgcaacttaaatcattagctcagtgtttttttacttacacagtacagtgatgatgacgaaatcaatggagtgacacaaggtgatagacttcgggccttgaaaagcagaagacaatccaaaacaaacgctattcctctcacgtgagtctgggttcctttgttgtggttgatgtttcttcatatgtgtgtggggtccttggtgagggtttttcctgtacatttttctccatagttgcaagcccatgatgccactttgaaatgcttgcctatgttatttaaaacctaggggtgctggccttggaagctctcagctgtcccttgtttaccttggtcctcatgagcctttatgggtgggaaggcgacatcagggatactttttctccatgaataatcagcatggggcatcctcaggagcgcgacagcagatgtaaagcccaggatgccagacttgtccatagttactaaagtggtgtatttctttacatttgccatgttgcagatcatttgttttgataagcatgacatgatggcttaatgacattatgttgttttggggcaacaatgaactggtctaaactatattttgggtttttcgtttgtttctttggggaatgattttctaattatagaggaagatttagcctgagaataggaaatgttgtagtactgagtgtatgtatgtctatgtgtacattcttgtgaatgtgtgttagttgggattcaacctgatggagcatccaagattgttagaaaaatatgcagaagcaaagtacatgaccatggtattttttgtaggctgttctttagtaaatgctcccacttgttgccattggatttcttccttctagttacttcctttttcattgtgggacaccagatttccagccttcttttttgcggggagggagtgtgatggacatagatcatttattcagtaagcatcttgtaatatggtaaggaagtatgatataatataccatttatattggcagagaacaggttttcttttcaattaaaagtaattcctcactagtgtctcgtcataaaaattctgaagtagaattacacctaaggcatgtgtcattatgggttgctcccctgggaggttcttcttaaaagacccaaggcaaagaattgagttttacaatatgcagtgttatgtgaatgaatgtagggcatccattttgattataggcatttattaagcatttcttttgcaacttagtggtactttagtcaactatacttttttaaaaatggtgccttttggccaggtgtggtggctcatgcctgtaatcccagcactttgggaggccaaggtgggcagatcacctgaggtcaggagttcaagaccagcctggccaatatggtgaaaccccgtctctacaaaaatacaaaaactagccgggcatgatggtgggagctgtaggcattataggatcccagctactcgggagggtgaggcaggaggatcgcttgaacccgggaggcagagattgcattgagccgagatcgtgccattgcactccagcctgggtgacagagtgagactctatctcaaaaaacaaacaaacaaacaaaaatagtgcctttgtataatttacttaactccaaatgccattttgtttttaatttccttattaaaagtcttcacctaaggccttaatggtttttctttggaagtattatggtggctccaggtaatcatccagatactaattctggatgtggtggaggaggcaggcagcaccctcgagcagtgcttctcagacttcagtgtgcaggaggcacccgggcgcttgttgaaatatgggttatgattggtggggtgggggtggggcccaagagttcacatttctatccgaggctgctggtccagggaccacacattgaattgcaagccctaggaaactgatgcttttgtgggttgattttagctgtgtctgggattttttgttttgtttttcagaatcagcatcatcagtttatgttttaatattttgttgcctgctgttcaaaagtcaagttgagagtcaggggatacaaatcctgcttagtcaaaagtttttgttaaataggaaatttcctttagtcaccctctgaatctgctactctcattaacgtgagttcaaatctagctgggcgtggctgtgcgcacctgtagaccaggctatgcgggaggctgaggcaacaggactacttgagcccaggagtctgaggctgcagtgagccatgatcactgcatccagcctgggtgacagagtgagaccctgtctaaataaataagtaaaatcaagtacaatggtaaaagttaaaaaacaaagaggtagctcaggattccttttggtaatatcccaaaaacaatatatataaatagccccacataacacaaataacaaagttttaggccacacttttaaagaagaaagcgaaatgctagtttttctaagctctgagttatgtgtatagacccgaggggatttttgatgagtctcagcaaatctccttcctcctcccttacaacattttgcttatccccgtctctgctttttcaaaccctctctgctattatttgcagttttttggccctagaaaagatcaattgaagattttctttctttccctcttgtgtctatgttgttattttaggaatagaagtccctgagggactgttctcaacagttgcttgggttgaaaaatacaaaatcaatttcttcatccaagtttgactcattgatttctgtgagcaagttattttgctttagcattggcacttagccttatgaaaatacagtacatgcaagaaggaaagttagtgagaaatacacaagtactagtgattcttaggagaaggttatagtacataaaatattattccaatgattggtttctctttttttttttttttttttttttaagacagagtcttgctctgttggccgggctggagtgcaatggtgtgccctcggctcactgcaacctctgcctcccaggttcaagtgattctgctgcctgagcctccggagtatctgggattatgcaccaccacacccagctaattttttgtatttttagtagagacaaggtttcaccatgttggccaggctggtctcgaaatcctgacctcaagtggtacacccacctcagcctcccaaagtgctaggattacaggcatgaaccaccggcgcctggccggtttctcttttataaatggtcagttttgggggagagtttaagtttttagtgattataaaatggccatttgctcagcctgtctgatcctgactacaatgatgacaggaaaccatgtggcaccatgacattgagctgatcttcaggacgtgatgacaagtatattgtctgtgctaaaatggatttggtagattgcataacttgagccatgaggcctgtcgttctgcatactgatggttttggtaggtttggagatgagtatatctgttagcaatggaaaataattctttttttatttttattttttatttttatttttgagacagagtatcgccctgtcgcccaggctggagtaaagtggtgcgatctcggctcactgcaagctccgcctcctgggatcatgccattctcctgcctcagcctcccaagtagctgggaatacaggcgcccaccaccacgcccggctaaatttttgtatttttagtagagacagggtttcactgtgttagccaggatggtctcgatctcctgacctcgtgatctgcccaccttggcctcccaaagtgctgggattacaggtgtgagccactgcacccggccggaaaataattcttaagccatgaggtttactagaggaaaaagtaaccatctataatgctgacacttggacattcgggccattctgcctttaaggaactgaaggtgaaggctgggatcggtagagagttctctagggctcccagaccatttattcattccatttaaatattcacccctgtgatctttatgtatattagtagcttgttttttttgtgggaagattaaataagatggtgtgggtataacttgtggggtaaggttaggctgtatttcgagttcaccctttagtctaatccctttccacaatataggatgcctggcatgtaatttctttttccccgagacagagtcttgctttgtcacccaggctggggtacagtggcgtaatcttggctcactgcaacctccaccttatgggttcaagtgattctcctgcctcagcctcctgagtagctgggaatacaggcacacgccaccacgcctcgctaatttttgtatttttagtagagatggggtttcaccgtgttggccaggctggtctcaaactcctgacctcgtgatctgcccgcctcagcctcctaaagtgctgggattacaggcgtgagccactgcgcctggcctgacatgtaatttttaatgatgacagtgatgaggtcaacaataaaaatgacatgataagccaaatcagccatttccaaattgattagcagtactcygcacacagcagatgctcagtagaggctctaatatttggtcacagatgtatccaggtgaccatttggaagtatagtcattggaaagagcttctgcccttccaaatgggaggaggtttccttcctcactgctagaacccagaccaatggattaagaaacaccaagctgaggctggacacagtggctcatgcctgtaatcccagtgctttgggagttcaaggcagcaggatcacttgagcccaggagttcgagaccagcctggccaacatagtgagattctgtctctacaaaaaaaataaaaaaaaaaaactgggcatggtggcatgaacaggcagtctcagctgctactcaggaggctgatgtgggaggattgcttgtgcctaggagttggaggttacagtgaactatgataacgccactgcactccagcctgggcaacagagcaagacccctgtttctttctttctttcttcttctttttttttttttttttttttgagacggagtcttgctctgtcgcccaggctggagtgcagtggcgcaatcttggctcactgcaagctccacctcccaggttcatgccattctcctgcctcagcctcccgagtagcgtggtgcctgccaccacgcccggctaattttttgtatttttagtagagacggggtttcaccatgttagccaggatggtcttgatctcctgacctcgtgatccgcccgcctcagcctcccaaagtgctgggattacaggtgtgagccaccacgcccggcctttatttttttttattttttttattttttgagacagagtctcgctctgtcggccaggctagagtgcagtggcatgatctcggctcactgcaacctccgcctcccgagctcaagcaattctcctgccccaacttcccgagtagctgggattacaggcatatgccaccacgtctggctaatttttgtatttttttagtagagacggggtttcaccatgttggccaggctggtctcgaactcctgacctcaggtgatccacctgcctcagcctcccaaagtgctgggattacaggcatgagccactgcgcccggccgacccctgtttcttaaaaataaaaaagaggcagggtgaggtcaggagttcaagaccagcctaaccaacatggagaaaccccatctgtactaaaaatgcaaaattagctgggcatggtggcacatgcctgtaatcccagttgcttgggaggctgaggcagaattgcttgaacccgggagggggaggttgcagtgagccgagatcacaccactgcactccagcctgggcgacaagagtgaaactccatctcaaaaaaaattaaataaataaataataaaatagagctcaggtgcgatggctcacgcctataatcccagcattttgggatgctgaggcaggcggatcacctgagatcaggagtttgagaccagcctggccaacgtggtgaaaccctgtattaaaaatacagtacttagccgggcgtggtgatgtgcgcctctaatcccaactactcaggaggctgcagtgggagaattgtttgaacctgggaagcggaggttgcagtgagccaaaatcacgccattgcactccgggctgggtgacagagcaagactccatctcaaaaaattataataattaaaaaataaaaaataagaaagaaacaccaagctgaaagccaactagtatgaggaaaatgagtgtggaaaacaactaagaaaagtctatagtatgcatacctaagtgaaattttgctcattttgtgttgccctgggttaaatgtgaaccatattataaaaatgtgccattcccttagcttcctggatggctcaggagttagtaactcccttgaagtgagatcagttctgctgtattacgttcatttttagttgtgcctcctgtgattttgttaactagtctggggttttgtgtttttttgtttgtttgtttttggttatctggttttgcctcctttgccccttgtggtttgctttagttttctgtgtgtgcacatcttctgctttttgaagaacctcaatcatttatctgtgactgatttcagtatcataaagttaaattaacatggggtagttatctcactagtgactgagtcccaaagtatgaaacctgtttaaacacagcatttttttattcaacataaaatggcaaaactccatccttgttgaccacccctttgtatccctgttgctgttggctgggcttttagggtgtctaaaattcacatatggcttgattgattgatgattgcgtaatttattttggcttcccaatttgaacatctgttctttccccttcacccctttccagatgtcccctagctgtgctgacctctgcactgtgtagtgttgtcatctggtggattgtttgtgactacattcttcccatcctgctattctgtctcgatggtttcagaacacagtagccatcaggaccccctgacagatagctgctgtaagtgtcccgttctgtttctctgccgttgcttacttctggtgcctagtgtggttcccacaatgcatgtttttctccttgtcagctcctagctttgttggtttgcctattttcaaaggttctttttctgaatcttttcaattaatgggatggtggtggggagggaaggtgggcttcactgttcctctcatagaaaggatattgaaagtaacatacgttgttttaaagttatgcttatccttaacatatttcaaaatagcagttgataaagacactgaaacagtttttcttcactgaaacagtttttcttccctatcaaaagtagttagcttaggataattggggtggttttattttcgtcagttggctatacaatttccctctagttttctgtatcttgagtatgtccttcccagtctagcaaagaagcatttttcccactgatctactttcattaaatatgtgattttgtagcctcgaaatctgccattgtacagcagctctctcataagtcttctctctttagtgtgcagaatttcctgctctgtctcattttcctcctcccctttagggaatacagtaagtacagtgtgtagcacttgatgctaaatgaaagtaggaggtcggagctgaggtcgcctgtttaaattggtgcatttccatatgatggtcattgttcctgcttttctccttgcccagacatagccagaatgcctttaataggctaatagcagcaaatctgtattctcttgagatctttcatctttgaaatgaagaccttaacagcgaagaggctttatttctgcagaagaatgtacaagaggcccacttgtggaacagcatgttgaagacccccagaaggcgggtgtgtccgtgtcacggggtccaccgccacccttctgtgtctgagctgcgttcttccttctctgaagctttttccttaactcatattttaagaatttcttctcttgtctcctcttggacttggaagttatgaaagaatgcaaaagttccttgcaagatctcttccaaagaaaarttccattgcaaccaactctggtactttgtggtttcactgagtattttcacatagctgagaaagatttaaaaatcaagctgatttcactcttcagaattaggcaaaacctgcttaacttgctcctatttatggcattttcttgaatatcttacaaataaaagcttattgtcgcgcattcagacctgctgtatttctgagatagattaaccttttgggtgttttcttctttacttctcttagtcaactacgattgccacatattctgactcaagagcatcatgcactacatagagttattcttctcaaactgttccaagtggcaaagatgttctgaatgggtggagcagttgcaaataatgcttaggcactttgtggttgaatgatcattcccagggtaagtttaaacatggtctctatcaggctctcttcttttcagtattccatgtaaactataccttctgttgttattggtaatgacgtttgccattgtatttctagacccaagcagagtattcagttcagcctgactaattatttggaattttgagaagcaaaaagcttgtgacagttacagtggtgttaatcagtatcatctttgtagcacccccatgtctttctctcaaaagggttttatttgtaaggtggtgactcctgagctccaccatcctctgtcatcaccacccacctctgctggcagtggacgcaggtggtgtggcatcgtctgctaagttgtttccagtgaaaagctcctgttatgcagcatgcctggagaattaggccataacaacacttcaggcttctgagtcagactcagagatagtgggaaagccttctctggaggctgcagggcctcagggtcacctttgtgcacgctcttgtggtgtccggagtggacagccagtatacatagtgcatagttgccctgatggatttttttcttggaattggacatttatgttcgagacctggctttttagtttttggctttgccgtgttccttgggttgcagatttcactatatctgaaatctcagagtaccgaggctccaaggatgctgcagagaagaaggtgaactggaatataggcaagaggtaggtaggatggaggattttgtcagggcagatgggaaggaagaaaatacatctgctgcacactgctctgcaaagccatgcttggcctgggttggaaggcagaaggccgcgagtgcccgggttccctgtgacagaggcaacacgtcaccctctggtgcctgtcaggtggtgtgtgctgtcactcatgatagctcagtggagttctcccccaaccccgatttcatcagtgcataacctgcagttaggataaataccgtgttgtcagtgcaaataactggagtcttccgtggtgtggttaatacactcaagttctatcattctcttggttttaaagttccacagaaattactagctatttaatattattattatattagttcactttaatttacactaattttatagagaaataaatacttttaaaaagatgttttccagcagcctgagaatgactacaggatttagcagtagtgtcttgttttgaatggcatttaaacacttcagtcatagttttaatttgagaaatcaggattcagatttcctaagcaggcagtgtatcagctcttgtttttttctcagattaattattttgcagtgtgattgttgtctgtacttttggccaaccgtggcctcaaattatttgagaattaggtgttgtatttaaaaaaaaaaagccaacaggagtcttgttttctccgtgcgtaagggagtggccgaggggagcggatgagaacagtggcagcacgagtgccccggcctgggcttcagaagtagcaatgaagcagcagcagtttgttttgttttgtttggttttatgcaaaattctatattcaaattcttagcagagatgaataaatatttccccatcactttatataaacaaataatttttagggatgggcagactggctcatgcctataaatcccaacactttggaaggtcgaggaaagagaatcactgaggccagaattttgagaatagcctgggcaacatagcgagaccccatctctataaaataaaaaatgaaaaaattagctgggtgtggtggcatgtacctgtggtcccaactactctggaggctgaggtaggaggatcaattgagcccaggatttgaggctgctatgattgcgccactgcactccagcctgggcaacagagtgagaccctgtctcttaaaaaaaaaaaaaaaaagaaaaaaaattttaaaaacaattccttgtttttagaagtagaattcacaagccagggtaatagttgtctttaatcatacaattaagatgcatatacactcttcttttttttttttatacaaagtctctatcacctggctggagatcggtgacacaaacatggctcactgcagtcttgacctcccaggctcaagtgatcctcctacctcaacctcccaagtagctggaaccaaggcacgccccaccacgcccggctaattattattattattttatagagaggatgtctcactatattttagaatttgggcttcttaatggtgtcttgtttcatgactgaaaatctgagaagctacttttacttttgggcataaagacttgtttggctggtggatttctttggtgtgggaattgcttaaaatgtccaggctggtctcgaaattttggcctcaagtgatcctcctgccttggtctcccaaagtgctggaattacaggcataagccaccgcaaccacctcctttttctattttgttagaacattcaacatatcagatgatcacactctaggagaatttctgaaccaaacattggctgatttatccaggattcatgtccctctgtgagacagaaagctagtttcatggggccctcagaaatcctgcatgagtaaagtgaaatagtggggaaagctgcccatccccttctccccagaaggcttgggaccgctggcccagacaagctccaggttatgctctggttgcggagtctcgctctttggcccaggctggagtgcagtggcacgatctcggctcactacaacctctgctgcccaggttcaagcagttctcctgcctcagccacctgagtagttgggattataggcacctgccaccacactcggctaatttttgtatttttagtagagacggggtttcaccatcttggccaggctgctcttgaactcctgacctcgtgatccaaccacctcggcctctcaaagtgctaggattacaggtgtgagccaccgtgcccagcctcttgttgcttttttagtgatgagatgtttagcattttactaaatgttggatatgctttggtttgggtcatgctaaggttgtagaaatttattaatcttagcctattttaaggccctgtctttggtatattagccagcatggtggtagctgaggcccgtgaggtgggatgctcactaattgtaatggttcaactttttactcctttgagctgggttctcataagttgttattggctttctcacctttatgtttgaataggagagaagaaagcttgttaagtcagtattttctctttcagagaattaaaagttggtatctataaatgtgtgtatatgtgtttagtttgtcattgattatctcttgaagaaaagaattgcatataggcctggtgtggtggctcacacctgtaatcccagcactttgggagtaagtgaggtgggcgaatcacctgagatcaggagttcgagaccagcttggccaacatggcaaagcctcatctctactaaaaatacaaaaattaaccaggtgaggtggtgggcgcctgcggtcccagctactcaggaggctgaggcaggaggatcgcttgaacctgggaggcagaggttgcagtgagtcgagatcacgccactgcactccagcctgggcgacagagcaagactccatctcaaaaaaaaaaaaaaagaattgcatataaaatcttttgatgtcttctgctgttttccctataacaatttaaagaggaaagaaaaaaaaaaaccaaaggaccatctgcctcttaaaggacattccgtgtggcctttatctcaggatgttcttttctgattcatcgtgtgcttcctcctgggcagcctactctcatatgcaccagtttctcaagctttttagagtttaattaaggcaagctttacaaaatttaagtgttttcactttcattttagtggcacttggagatttagtaagtgttatatataattcaggcaaaactcatattttgcttaaacactttctaaaattttgaaacgttatataaaattagtattgatttagtggattattacccatacttacagctttgaagagtgaatattgtatagttatttcctaaatttatgttcctattctttagaatttgagctcttaatggtgtcttgtttcatgactgaaagtctgagaagctacttctacttttgttgggcacaaagatttctttagctggtggatttctttggtgtgggaattgcttaaaatgccaagtcattcgccttccaggagcaaagccctctggttgtctttgtgtaaccttcaaagagaaacgagatgcttcattttaaaaggccttgatgtgaaaatgtgtttcagatttttttggtaaatgtgttgatggaaaatcctctcaattctcaagataatttgcactaaagtgcaaaaatactttcctctgtcaagtatttgcaaatggtttcagtgaatataatcttatttttttccaactattttcagagtaattcttcaatccagtgttcagagctgtaaaacatctgaacctaacatttctggcagtgcaggcattactaaaagaaccaccagatctgcttcaaggaaaagcagtgttaaaaggtgagaaaagaatcctactcttctgaaaagttgcaagcgtttgttttccagtttaatatttggaccctacctctggagactgacatgaaattaggagaaagtagagtctctgtgatgggaaattcatcaaatgtgtattccttgttcattatctaagaaaatctggaccattttaatgtaggcttttgttttgttttttagaagtaattctcaacactggaagtatggtctctgggtcatgatatgggaaagttttaagttaagaatttccaaagctggctgtcaggacttggaggacatttttctaggtgtatatcagatacagcatcattgctggacgattagctgcaaatgaatgtgatggtagaaatgagataaccagagagtttgaagatccttcyctacctagtgactctttgtcctcttggccacagcccacacccgaggcactagttctttcactgtcgtcactgtcttcagtgagtgtaggcagaatttcacaaggaaaccaatgtgttctgtggccacgtcggtgactctgttgtctttggatatttctcatgaagtggacatgtcatttttaaagtattctgaaaacagatcccatctgaagagagaataaatagcccaggagtggaagtggggatagatggctcaggagtagaagggggcaccttttcatcgttgcctggtgttggcagcccatgcagtcctgtttctgtcctcctggtaaaaacgatctcttctaatagacatgagcgacctgaagataatcagaaccagactttaaaatgtcctgcacgtgtaccctgcttcttttcagcttccctgccatgtatatccgaggctttgggcctaggggccttatcagtgtgaaattagtccccagtgcaaagcagccagtctcccaagagaccttggcagagctgggagttctgtgtgctttgccttttgaagactcattcagctctgccatgtctcctctacactgttttgtacaaccttactgcacacttaacactcgcatggggatgcagcagtgccccggcataaggattggaggactgtcaggcactgactcatgattccaggatttaaaatttttcattagaaatgtaccaaatattcctatttctttactgtttgattcttcttgagaagaatattagagaaatactgaccaaaggtcaaagatttcggtacattggaacaatagcggagtgttatttataacagtgagaaacaggaaatgggctcaagattgttacattatgccaaatgaattgggagtcatacagtttagtacacgaagcagtaagtgaaaagagccatgcataacaattctgaagtatgggccgggtgcggtggctcgcgcctgtaatcccagcactttgggaggcggaggcaggtggaccacttgaggtcaggagtttgagaccagcctggccaacatagtgaaaccccgtctctactaaaaatacaaaaattagccaggtgtggtggcaggcacctgtggtcccagctactcgggaggctgaggcaggagaatcgcttaaacatgggaggcggaggtttcagtgagtcatgatcacaccactgtactccagcctgggcgacagagtgagactctgtctcaaaaaagaaaaaaaaaaaattctgaagtatgactctaattttgtaagcgtaagtatactatatatgtatagaaatatagagatgtataaatatttatatacctacaatacatctgtatttatagatgagtaagtttctatatatgcatagaaataagacaggaaaaatatgctatgatactaataaaagttctggttggtgggacagttgggatttttttcttttttatcgtcttattttccaatttttctacaataaatgaagggaaatgggagtgttttaactgacactttttggtgagccaagctattaaaaattcaggctgggcgcggtggctcacgcctgtaatcccaggactttgggaggccgaggcaggtagattatgaggtcaggagttcaagaccagcctggccaagatggtgaaactctgtctctactaaaaatacaaaaattagctgggtgcagtggcgggtgcctgtaatcccagctactcgggaggctgaggctggagaatcacttgaactttggaggcggaggttgcagtgagctgagatcgcgccattgcactctagcctgggcaacagagcaagactctgtctcaaaaaaaaaaaaatcaaataaaaagcctatcgttgatgacagttaattgttaattttgacatgtcttgaaggggcatattctttttaggtatgagtgctcaggcttttttttttttttttttcctttgacatggagttgcccaggctggagagcagtagtgttttctcggctcactgcaaacttcgtcttccaggttcaaaccattctcctgcctcatcctcccgcctcatcctcccaagtagctgggattactacttgtgggtggcatgtgccaccacacctggctaatttttgtatttttagtagagacggggtttcaccattttggccaggctgatcttgaactcctgacctcaagtggtccacctgcctcagccccccaaagtgctgggattacaggcgtgagccacggcgcccggccgctcaggcttttgttaacagcgtagtgtgtcttgcacatttaattctgctgtttgcttttttagattatgctttttaggttacagaagagtagagtccgggagcctggctggcacttgccaggtcatatcgtcttcctgtgaggaaggaagggctggccttgcctctgtttttctatctaggtctcgttgcgttttcatgtcactctagtaacctgaactcctgcctctctggagaagtggttcctggttgcagcaagcatctgcctcaggtccctggcagggatgctttgagggtcctaaggtagatttcagagtcagtaatctggactgaatgttgaaatgacccaaagcagcttccaggaatttgggatagttctgaaaaccaaaaagacttcttttaaattccaaaatggactttcagagatgatgtggagagcaaaaggagtctaacagtgaggattaactgggactcacagtttatttccccaccttcctctaagtgggttctttctttgtgcctcttttgggactttgtcctgtgttcacatcaccctacctgttatccacctacagcttacaaaagaaaggcaaattatgtatagkttttaagaattggagttagccaagctgtagcctggagcttttatcctactgaatattattcataatatcatactaaatagtattcatttctgtttggagggcaagagggaattagtatattggtgcacggtctgattctggacaaaatagtatgagctaagattgttgagtaaatttaaagtattgagttgaaatctttaaacagcagtagaaaaaaaaatagagcacccttttggggtcctttcatccctacctgcaacrtagcaggkttaccagttcctactggtttgtcatcatctctgcggcacatgggaacttgaccttccattttcatgttccttggcatccaggatgaagactccacccaaactcgctttgcgcttaattggtgcttttgatttttggttttactgagaggctcttcagctttggggaactttttcaaaaacgtcaaaagagcaattacttggggcagctgaaaaaataggagtgatgtcttaactatttgtctttgggaaaaggtgccactgtttctcacagaagatgactatcccctcgtgtatccatttgaagctgtgccacatcgaaacctaaatctcatgtggccacaggtctgggacggcggccaggcagcctgtgtggccctcggtcctgccagggctctgtgtggcaccttctcattcccttccctgagtctggagagggaggtgagtgggcttctctacctcccacttcctgttagagctataaatccatgctaacctttctcttttaagaattaataaatccagtgaataattggctccgttgaatcggcctgttttcagtgttctcacatgacctctctgaagagctctcttagaacagtcttggaaatttcatcatgccccgagtgagagcctgcagccacctcatttgctcgcattcactcatgtcttcacgcagcccttccgctggtgcgtgtttgttagcttatgctgtttcttttgggcaggctcttctttttttaaaatgataacttcattcattttctaagaaactggcatgtacaagttactttaattctgagttgtatcactaggaaccatcactttctgctgcagctgccaaaccaaacctaaggtccggggctctggagtgctttgtacctaattcttcatattgtgggggctggggrgagaaatgctcaggttctttccttagcatcttttttttttttttttaaatgagacagagtctcactctgttacccaggctggagtgctgtggtgcgatcttggctcactacaacctccacctcccaggttgaagtgattctcctgcctcagcctcctgcatagctgggaatacaggcgtgcatcaccacgcctggctaaaaattttcttctgtatttttagtagagatgaggtttcaccatgttggccaggctggtcttgactcctaaccttaggtgatctgcctgcctcggcctctcaaagtgctgggattacaggtgtgagccacggcgcccggcctctttccttagcttctaaaaccacgagtgttttcaggagcccttcagttgggagcagctgcatctaggacctctaacttcttcagtgttctcgggtggctttgctggtgtcacacctgccactgcctcttgaccctcagagtctcagatctgggcacctgttccgttgcctctgggtgttaatttttggctactgccattatctccaaagtccatcaggagaggagtcccagaaggttgtctccaaatgtttctttgtaaaatactgtttctctccagtgttttaaaatattaatgatcctttgaaattccagatattttcccacttgtctcactagctggtctggatctttgactcagtgctctgttgggatctctgaaaacgaaatgatcgattcaaacgcttctccttgaagagcgcagcagcagcagcatcgggcgaggagccctccagattggaagtggtttttctgactcttattttggttttgtttgctttctgaaagttgttactgacctgaaagtgtagcgtcgtgaactggggaaggagagaagagaggcaggatgagaatcgtggagtgcggaggcaggtagcccgtggggtgcctcctgtgctcggtggagctggaagccgcttaggtgccagagctttttctgtgaccaaattctggcttttgaaataacccagtaacagttctctatcttttcattctgcccgctcctcccacagcctggtccctcagaggaaaggaaggacaaggagtgctttgcagcacgtgcccctggcggcgtcatggtactttcctggccctgctgcccctgcccgtccgtcttttatgatttttatttactcgtattggtttttttaaatttctattttttgcagaactgagcctttttctgccctgcctttctcctgtttgtctttcctttgtggttgatattgtgttgtcttctccaaagtatttgtcattagaaacttacagcaagcgtatactttttagcatgtcagtatttttattatgttgccctccttgtctttgatractgcctgtggacgctgtgtaaactttctggtaaaaatccttttttttccccctgtagtctctccatttcaaggactaaaacagtcttgcgttaagtaaaaacctgtgaccagagctgaaggaagactctaggactgaaaactgcaacagaaattagcacaatttgaaaacaaaacaaaattgcaaaagccttagttgctttttccacctaagaagttgatcaatggagaaaatgtccactggagtttgaataatgaactttgagtttgggtgcaagcaaatgactcagagaagggtccagctctcaagctgaatgacaaacatgctgttgtaaatttagtctcaggtgtaaatacccaagccctctggtacccagggagctggctggtctgtggtgcatgtgtgtccctgtgatggcaatcattgtagttgctggccttcagaagaattgaggatctgatggaggttttttatgtatttattttctgttcaccttgtgaccctgtgtcaaaatttataaagatacaaaaggcattactgaaatggtactttctgtaatttgatactatttggcttaatcatcttcacttgactatttgtaatactgttgtaatgttaactctgttaagtacccaagctgcttgtcttccaccaaagagtgctttattaacaagaatctgtgaaaatcacatttaaacactgttgcatgttgtaagaccaggtggtaccttagtaacctaaaacttgcaagagaatattaatggtagctttagaagactcaggaggagaaactgacttcagagttggaagatgttgcaagtcgttcctttttctgtccttcagggactgaagaactgggaggctgcccattgtttggttgccagtcatacaaattaaaatcatatttccttccatgaatggaagaaacacactattggtttttccccttggaaacagcaatcccaaataatgtcggcttacaaaaaaaaawwgttaccacttttttagagtccttccctgtaacattggattttttttttcccttatgagatccacctaaggccattgacgtggcctgcgatctcagtgacaatgatctgcttctggatctcactgttgcctttggttagggaacacaactagtaactctgcagagtgccttctcccgcagccctactggaacacagcagagtctgtgccatgaagcagttacagaaacagaattgatgtgctgctaaaaaaaaaaaaaaaatggggcccgaaataaaagaatatatagtactcacctcagttccttccataagaagtgggtggtttaatgattgttaagccatttttgcctgtgccgggagcatggagggctgagatgtcgacaggcagtgggaaacaaatgccctcctaagccacaaggcgtgcgccagattagtaggcaactccattttaagaagctgcctttttcacaaaactggaagaaataaaagcggttggaataaacaagttaaaagtctttaatgcaaaaagtaattgaaaggcagtgcctccattttggtgtactttcttggaagaaagtataaaattgaccggcatcatgagagacggaagatgccgtgttctcagccaaacaagcaactctttccccgccaggcactgtcgggtggggtcaggccagcttttaaacactggggactggatcacagaaaaacagtggttttctgtccctggaaatgaataggcacaaagacccacttggctgtgggcagactactcttcaataagatttgggtgggaggaggaacattccttttgctattttgagctgagacaatataaatattcaaactgtgccatgcataaagcattgaattctcagggcacctcttcttccccttaccccttttaaggccatcccctccattaataataatccaggtagttgtgaaaatcgtgcttctatctgatcccttcttagtttggcttttcatcccatcagaacaagtaaacgtaggcgccacagctcttgtgagtactgtctccctcacggtgaatgagcctcctggtgtttcgtccaagaaaagaaagggtgtcactggaaccacagccctttttcattttataaactgcctcttcatgttgcctgctcaagtttccacctagaattgctatcactgtggctctttctaaaaatctttctatttaactggttcactgaaattagtcatagaaaacttgtgatttggtgaagaggcattccttgtaataaccaaatgacttgggatggtgtgcatagcaagggcagtgttacacttatgaggactgtctctagcatccaggaagtctctgggtctgagggatggaaagttcttcctgctatgaatgagagtggactcttcccctcacccccaactgaaaccacaaacaaccagaatcttctggaattctgacttagagtcgttgttatagaagaccttgttgctatggaacatgaaactgtgtgtcagatggagagatccccttaacctaagagccttaaatagccctgaaagtacacygggacggtttgcgatggaattaaaattggaagtgaatatttttargtgctcttgaagctttctggggactcaaaattatcaaaagtcagggacagtccggaggaagagcgtctgcaaaactgggttcctagaagtatagacggacttagctttttgtagaatttggtgaggagcagcgcctcgtgagagcagaatggcctggcgtggccagtgcttcccggcagcacgcagctctgcggcctccagaattcccctgttctgagcttgatgcccctagcctgtcccctacctacttcctcccctcctctctagccctctcacaggggtgattgctacctctctgttttcttgggcctaggcaagttttagaggagttcccaagcattgttatgaggccagtgtgctcgctgggctgggcgggatggcctgggcttgtgtgtggcctgagggctctcctggggccttctcttttcccagtcacctttggagccacagaagcagtgcactcattggatgtctgttcttaacacagcttctctttctacattaaaaaaaatcattattgcattttggaaagcagtgctcatcaaaagcaacttttaaaacctattttattgttcctttaaatgttctctcccgctgaaactgccctggagaggctatctgctgctcttccatttacccacatcaggttattctccatgtcactcagtggagatgactccagatgtgtttaaagactggacaattcacctatactgtgtaggaaattacctccttaattacctggtagaattgtcagcagacatgttcatccgatgatagtactgcagttttctattaataatttgcagacttttatctaacctgcactcatgtacagattattaaaagttttaaaatgtaactgatcagtattgatcaatcattgtcttgatttttttttacagcgtatatttctaatcatattttttaaagccaagagaactggttgaatgaatgtttattttcctgaaggtatttttaagataaagcttcctaatggcgtgtaaactttgcatatgtatgtagtttgatacatattgtcacatttgaaaatcttgtgggttgtaactggttttatacaaaatatcgaatagtggaaattgtataattacaatcatgtaattaaaagtattaacccaacagcctttttgtttattgtgttacttaccaagcattttgaattctggtaggcagtgggttagatcataaagcagaggtaacccggaatctgtgtaagttttctaggacggccataatggaataccccagactgggtggctgacacagaagttcatttcctcacagttctggaggctgcaagtccacgaccaagctgtgggcgggcttggtttctcccaaggcctctctcctgggcttggaggcgctgcctcctcgcagggcctctctttggtgcctgcgtggccctggtgcctctcttcccctctactcccctctcaagaggacaccagtcagattggattggggcttaccccgatggcctcattttaacttcaccacgtcgttaaagtccccatgtccacatagagccacatctgaaggggctggggttagggctttagtgtttgaatctggaagttagtccagcccccttctgtagggtaaggtggtgagtgacagggggctcctgctgccaggccattcctcacaccccagcaccagctcacacaacacaaagttttgactttctgcagacctctaaagataagacttaagtcagtcaggctcttgggatcctgcagggcattttgcctgccaaggtcgggcggcaccggccccagcaccctccccagcttgtggtccaaccccggacgccagacccctgctttctacctgccttgcctctggtgccgggcaggaccccaagggctcagtgtccacacctcacacacagcttactgctgagactcaagaccctgtgttctgtcgagttctacccagttcccccaaggagctgtgcttggattcacactgggttacaagtgtccaaagtaaaaaccagagacctgccttctcgcccctctcccgactccacaccacacatgaccccccagagtgttcatttgcagaccctggctctgtgggagctgtggcctctccctgcccctccatggcttcccctgaggccactagagctctcccctgacccactagagctcaggcagctggcgccaccacgcagctccgtgaagtccctgagtgctgcaaaggggccggcttggaggcattgtttgagatgaaaccacgaggcatgtctgttcctcctggggggctgggccttctaggcctgtggctgggaggcagcaggctgcagggacccctggtccttagagacttgtctccttccctgtcatctagagccactcggcccagggcccatccaccttgtgcgggatttgctcatcccctctgcttccattgcttaagtgaaatggaaatgaaaagaatccctaccttagcagttggtatgagagttaaaataacacgtggaaagtgcttaaaacagtatcggggcatatctttcaattcgctactttgtcatatattttaggtcattttctctagataattggggaaagaatgactgayagcagattacagtccctcagtttctgatatttttggtacctgcagcataattttatgcacaggtaatggtgtaaacatttaaaaagaggtcacgtaaactattttgccttgaagtggggacccacacgctgaagctaagtctcgagagtggttgttcagaggcaagcttgggccatgggagaggagctgcaagggacccttcccgcggcccctcagtggactgaaatacaagttgccgtggaaagtgcaagtcccactgggcgtatctgccccagctccgccacttctgtggccttggggacccttgatctgctggccgagcctcacttagttcagtggtacaattggactagtgagcacctagcgtttggtttaacagaagtacgtggctgtgccttagctgggggactgtgacatcaactttgccgtctccccctcctctgtgtgtctaagtgcagctatgggtgcattggaaaggagcatctagggaggaattctccaagaacacgagctttagctcctctgtagcacgccctgactagctgccacactctcccggttgacgtcttactgtcagagcactgcatccgtgttctgcagaaattcttcctgggcggtgctggctatttccttaggataaattcttacaaaaggggtttctgggtcaaaaatttgtaagacgttaaagcttttgctgtacactgtgtgaaaaagcagcttggtacaattgttgagaacatgcattctgggcccaggctgtttgcaaacctaagtgctgccacttagcttagatttgggctaagtgacttaggctccctaaacccgtttcttctctgaaatggggatggcagtatccatcttagagggttgtgtgaggatgaaatgaaaagttaatatttttcatagctgagaacaagtgtctggcacacgctaagagccatatatattttgcctagtaaaaaaaataaaattaatgctgtccaggagaagtgtaaaaatgcacagtcgccgctgcccgctcctctcccgttagcagctgttgtgacgctggtgagctgctcagttratagcaggacgctggcctcagcgccgtgggtagggggtcacgctcactgtcctgctgtattatgtcgtcctagctttagcttttccacattgattttgggcattttgtcttccaascrgttggcgcagcctgcccttacgtcctagcctccctgtgtctatccgtttattgggggagaaatggatccccctgagcaaagccttccggattcctccccagcgcctcgggggtccctggcctgtgtgggagtggggggcctcccgcctctgcctccccgcccctgcctccccgcctctaaccccgcctgactctttggcagcaagtctgcatggctttgacacgcttctggacgacgcgtgctgggtccacacctaaatccccaggtaaggaggccccggcctggccgcggaggctctaatgggccaagtctgtttctaaaggggtagacgactccgcgtgggagggccaccgtgtgctttgtgcgttgtgggactcggggaggacaatggtttctcctggccctgggtgtgtttctctgtgttaaacgacgtcttttcaggcggggccgttctccctggcgtgggactccggggaatgcagcgtgtctggcgtcctggcacccgcctactcggtgccaccggacggtccaggcccccatgcgtttccctggccccgggctgttgctgcccccagctgggaacggctcactcgcttccaatgccgcttgtcctgggcagtacacaggacagagaagccgcctcggtgctctcgggccggcgggcagaggaaggagctggaggaaggggcttctcggagggagggcgcgggacgggctccccgggagcgggtccgctgcacctcctccagcggggacttcagggtggcctgggcggtggagccagcggggtctcccttgcctgcgcctggattgcggggtcagccgggacccagccggagggagacgcacggagcgccccggcaggaccgcggttggcgtgtccttaagtagccgcggagtgtccactcagcactcactggccaggctggagggtaacggctgacggccgttctgggccccaacccaagtttgccttgcggttgagagttagcggcccaggaagctagtccttgccgtccacacaaactcaagccctgagacaggccctgtggtggtggtggtggtggtaagtacagcgctgtccatctcctcccttttccagcgatggttggctgtcccaggctgtcacctttctagaccggcttctgatctggctcgggatccacaaggactagacctgcggggaaggtctctcctggacacgcccgttgcccactgcaagttctctccaggtgcaattgaagcctctcagcaggtgcgtctgcctcattcttccactgggtattgagccatcagcccagggccttcctttaggtgggcctcggcctgactgggttgggaatggccgggctgacacccaccctgggatggtaggaggcccattccaggcgcagcagggcagtgctgctgacactttcttaggctaggagcccctgtgcgatgatctgatggaagctgaggcccctccatctccccagaaaagttcgcaccaaatttttgaaggctgcatcgatgggtcaacttagtgacttgctggctgtggccacacaccccaggtgtgctgtttgtacagatgccgtgtggaaggcacccccggagatatgcagtgatggcagggtctattcatcaatcagcaacacccacgcagcctcaccctgcctgggcctgccggggagcctcagtaaaaattcccagggcatctttctaccttggtcacagcaacccagttccccaagcatgtccctcataggccacacggcgttcccatttctcctgctgtctttctatccaccttccctcttcctgaaaacttccccagcatcaccgctggctccagctctatcctctcaccagcaaaacatgcaagttgtggtcagtttgcttagaacttgtctcagatacttgaaacgttttcctcactgttgctctgacgcaagacccgtggccagtatccatgtgggccgccagtacagttgtgcaggttgttcatcgcacaactccagggagtgccaggcacactgaagtcaatgtgagccaagttcctgggcaggggcggggggcgggggggggcagcacacatgggtgcccagaaagggcagccttgctgaaggcgccctcagtccctttgcagggtggtggttcttgagaaatgtcttaccctgcctcagtgtctgagaacatttgagactctcagaagcctcctgtgggtttatgtacaagttgatgccacatggcaggcactccttaccttacaaatggctttgagctcccaaagttatgtaattcagccctctgggaytgggcacagttttgtaaagaaagtgttcaggccaggcgcggtggctcacgcctgtaatcccagcactttgggaggctgaggcaggtggatcatgaggtcaggagatcgagcccatcctggctaacacggtgaaaccccgtctctactaaaaatacaaaaaattagccgggcgtggtggcaggtacctgtagtcccagctacttgggaggctgaggcaggagaatggcatgaacccgggagacagagcttgcagtgagccgagatcgcgccactgcactgcagcctgggcgacagagcgagactccgacaaaaaagaaaggggaggggaggggaggggagacgggatgggacgggacgagactggacaggacgggaggggacgggaggggggaggggacgggaggggaggggaggaagaaaaggaagggaaagaaaggaaaggaaaggaagaaagaaagaaagaaaagagtgctcagatggcagtggttccctgattttccccacagaggactgattggcccaaggcgtagctgtggggggtgtgagagcctttgcaatctggtttgggaaattcctgtcatctagagtccaaggaaactttgtggccaggcagagagctttccaggagcaacaggagatgtgcagaaaagctgggctgggcaaagcaggcaggagccgctaggcctttaggcctagggagccaagttttagtcccatccggtttacatggagaatacctgagcgtgggccctctgcactgctgcagtgtgcagtaccctgctaggcaccatggccatcgccacatggctcagagtggctgagcacagaggcaaacactccatgtctcctttcatcccctgcctgaggtacaggcatcccttttcctgtcccctctcctaacagctttgcccaagggactagtcctttcactggaaatttcaggagtgtgtagaaaggatgtggggctcagggactgaatctggtttcagtttctaccttccctaatagtagccaggtagcaagaaagacagcgtccttgcctgactgtaaaatgacaaggcacgacaagacagggctcccaggctctcaagcaaacgctctgctccttcagtaaccaggctttgccataggtgcagggggaaagcgggtaggaggaggggcatccttcggacttaaagtctgaaagacttctttgaaaaggcagcactggcgtggaggggagcgcctggaggcagcgcgagtcctgggagcgcggggatgaggtggtgatcagcatggtccacgtggccaggctttggaggaaaacgtggttacaaggcagttctgcactttttttaagagatgaagtttttctctgtcacccaggctggagtgcagtggcatgatcatagttcactgtaacctcaaactcctgggctcaagccatcctcctgcctcagcctaccaagtagctatgactacaggtgtgtgccacccacctaattttaaaatttattgtagagacatggtcttactgtgttgctcaggctggtcttgagctcctggcctcaagcaatcctcccacctcagcctcccaaagtattacaggtgtgggccaccatgcccagtctagttttgcacttttatctgtatcttatttgataataaaaaggctttaaaatatccctgcattttttcttcctcattcccttttccacacctcatcctccatccacaacacaggccccctgtgggacacagccaggccaaagcctctcacgcccgcagcccaccccaggttgtctgaagcaggcatgagtgtcgggagggttcagggaaggctgttcacatgggccacggtccttgcagaaggctgagaggagacagcagcagccaaagaaaatgagcaaatctgtcttctgtgtctacagcggaggccgccatgtggagagagcaggcaggcccactgctgctgagaacagggcaggcacgggcagctcctgttctgcctttcccagcttcggagacgcaggctcagctgctccgaagcacctgccagcaccgcacagtacagtttcagaggacagcagtctccttcccgtgaagctcccatgtgctggaatggcatggacttgctgatcaacagaaggaaatggtctgaagtctgaccagcacaaggaaggaggctggctggctcagaggggcccaccttgcgtggaatgaaaacgccaaaggctcatgagcaacattaggctagaggggtcttgttcaaagcatccaactctgacttcggaggcattcccagccggcagcagtgtgtccagcctgcctcttcccaggctggtctgacatgcagcttaggctttcatcccaagttaggtactgacccctccctcttgggcagcacctccctttttaaaaaaatttttttttcttccaaagacagagtcttgctcttgttgtccaggctggagtgcagtggcgcgatctaggctcactgcaacctccttctcccaggttcaagcgactctcctgcctcagcctcctgagtagctgggattataggcgtctgccaccacgcccggctaatttctgtatttttagtagagacagggtttcaccatgttggccaggctggtctcgaactcctgacctcaagtgatctgcctgccttggcctcccaaagtgctgggattacaggtgtcagccaccgcacccagccaagcacccctatctctagaggatctggccccccagcccagttactgcagggcagctttccccacctggtgacaggctgtgcgcagcagccccaggacctcaccctgagctgagtcttcaggagccgccctggtggcacaactcagacacccctgaggcctagcagtcaactcctgattcagacatgatccagtccagcctgggcttggctataaccagctcaaacttgcttgacctccacttttcaggagacttggggacgacagccctcatcggcgtctttcatggggttaatctgcttgagtctaagtcgccagccagaaacgtggtgcccagggtgccctgcctcargacatgtccacacccacgtcacaagcacctgaggagtccggccggggcactgtggtccaaaaggtcctgccgcctccgcatctgactgtcccaacggcatgctggtgacacccccctgcccttcgcttctgtcctccctggcttctctggggcacttggggctatgtacaacctggcacgatccagaaagggtgcaaacaaaatgcctacatccaggcacacgaccaagtcagcgagagctagccctggtaagcaaacatagcccattacaggttcagaacgtgcaccgggttccccaaaactgtcttcaaccacatgactcaacagctctatgggataggaactgtcagtgtttttgcaactgcaacattaaaccaagtgctgtgggcttttcaagtattattcacaacactaaaggaaagtttcttcaaagggctctctggctaatcttcaaagccgcrgttaggcaaaatgacagtgtgacagcttcaaagccactgactcatgacacagccctgatgttgtaccggctaggttcagatttcagaaatcagggcacttgcatccattgccttttccaggaaagggaagaaaacactcagttgataaaccttagtactcagataataaataagagaccaaaagtaggctatcacccaaagcaaacatccttaactgaccctaacgtgtatggattcaactttgattattcaacaaaatcatgaccgactgctgtggcctggagtaaccaaaggactgttttctctacacaaagtcaggagcgaataccaacctttatttgcacttgggttccagttcaaagccaccttagacagtgtggcaaagtgggaaaaagcacagatcctgggaccaaggttcagattccatctcaagcgagcatatgaactgtgtgacaacaggcagacagtacctctgtgtctatgagaaagcggggagagcaacaccccagcttctagcagctctacagctgcctggacctgcaggccctcctaggcccacttcctccccagcacagtgtgtgttcccgggcgtgtgtggctctgggtccagctctgttcagggtgggactccaggtgaattactgaacctctgaggtgtacccccaaccccaaactttcaccaaaagcaataaagaggaactctagaactggagccaggactaagtgagaaaaactgcttataagtgcttaataaatactagttatttacaacttttgctcaagccgagggcagaggcctttgtacgcagctgccgaactctgactctagttctgcggaagaaaaggatgcggtatttgcttttgccatgatccctttccatttrattggcaggttaaataacatggtttttgaagtcacatacttaatattcttcctaaaaaccacccaaacactagatgtgtgtgtgcacacacacagaaaccacgaggtagtttaaatcaccattaaaaatcaacgctttctctgattctgtgtcacasagtggtggccagtggctacacaatagcgatttttaaatgattggttaagtgaaaaccagaactcaaaatattccaggagagaagataacatttacaagtaaacagtaagtgcaattgtattttaatttcttggtctccgaaaactcagctgtgactgctttccattaacagttccagctctatgtgtttcctctaacgctaaaggcacagcccccgggaatctactgcttcctaagagtctccatggagtctattttacaacctcctttccctccatgcttccgcggaggagtctatactatctctatatacacattttaaacattattcttcatttgaaattccttcaataaaaacacagtcaccattcttcatcttcttgggaaatggcctgctctcgagcctctggagaagcccctctaacagcycagcccaaaaaagtgcaacaaatttacatgacacgggaaaagcaacatctattgttcttagagtctgactcccttggcccagctrgaaaagtctccccacaggtgtgcagtgcagctccgcggtgctgggaaacagggctctttcaagacagcgcagggaaatcttccgggtcatctgggttgggggcaacatcttgcatctaaagaaaaaaagaaatactttgaaatccactgccccttcatccattcccgatatcccagtgggataacaagggcctggcaccaacgctgaggggcctgcattagaggcaggacccacagtgggaaggggagagtcacaggtcactgctaacccaggaaagtacagctccccctcccacacaggcctccagcctcctcgaaaaaggagctgcctcccttcctacgtcctgcaagctcttactgggggttctgcatgggcacgtccttcatcgagtaaatagaatggttactgcgtgccgggcactggaggagcacagacagtgcctatcctcggggagctcacggtgctggagaaactgaccatcgaatcaggagcttcactaacacgtcctgggaaggaggggccacaggagggccatccagtgcaatttggtggcacagtggacaccaaggtcaggcaaggttttgtgggaagagaaggttctccctgggatgaacctcaatggatgagcaaagggaacaaggacttggattgggaaacagtgtgacctgatgggggcgggggcgggccctaagggcggttctgaggtggagggatgcacaggttgtggaggtggggacagatgccagtgaagaggtgggtggcactggatctcagagtggtttcccaacacactccctggagtgctgcaggggacagagctccgctataggaaaggagtgagggtgtgtttcctatcgcagaatagaccctatttccaacctggccccaaatatacccctacaccccccgcccaaaaaattgtgtttttgctcctgcttaagcaaaaacaaaccatagacactgcttccaggggctgctccctagagcgagggaaccgggcagcaggaggagcattgccaagaccagccacagagaaggggtctgtgccatggggcctcggggctgatttccaatgaataagtgtccataccacattaggaagcacctactacatgccaggcactgcgtggcactgcgtaaaccggtaatgagcaaaagcagccgctgaccgatagccacaccagtgagaatacagccgcacacggagatcaggcttcaatgaaaagaaactcctttgctccgagaccttgatcggtctaggagatgtgatcaaagaaacctgtgaggaagtgaggctggaaggatgaatggaggccagcaggcagaggccaggggtaaggagcgtgctgtgttgagagctagaatcaggcagccttggctgaggacggtgtgaggcaggtgagccggggaggggttgaggaaggtcccctcacaaagggcttgagatcttagggaggattctgtccactctgacagcatcacctgagcccaaggcacacaatcaggccacagtaagcaaaacgtcaggtgctccagttcaatcccaagcctggggatcttgtctaatgcgggtgacagtgagtttctctctgatcccgggagtgccttcacagcagaccctggaagccagggctacagaacggtctctaggcaagatgtccatgatgctacaacaccgtccaaatgccccaacatcagtcccacactagctacagaaagaagtgactgcagaaactcatgaccctctgaaattagaccatcctgggcccagggcactgtccttattaacttctttcgccaaaccgtcaatacagacacctaccaccacttctgctctgggtccatagttctctgccctcctgatccttccccggcctccccgggtgcctcctctggctccacgcccaggacgagggaggttaccaaaattaatctccagctgggatgtgatgtcattggcgggtttccggaaaacatgggaatcgtcctcatagtcatcttttaccatctgaaacacaattacagcatcaaacacgcacaagtccacagccatccccacactcatctggcttagtggctgcagtgtgctacacaggagctaaaacaccatcaggggctagtcagagccattctctggatttgtctctggccctgggctgcagagctggacaaaggaagacagcactgctgttctgattctaagacagtgagttctgtatgttctagagtcccacattcttgcaattacaatcttaatccaaacatctttgaacttattatgatttcaagtgggaccaaatttctatcagctgagcaggttaagatataagatttggcatgactaataatagcaaacaatatacatgttttatatctaagtgtattttgctgagataaaaaagttttcatttctgcttattttctgtcttatctgttcacaaatgctttgataaataaggaaatatccccttcccagaacagaacttaacagagaaattcctttcagcatgggtgctgattataataccatgtgctaaaaatcacatgatttataataaacaattctgactcaaaatatagagaaactttataaaaacaagagtatggttacctgagtgttctaccaacactgcacaaagaagtcaagctgctttttaagaactgctttcattaaaattctatctcttgtgacagctatattaaataaattaattaaatctgatccaaatttgatttggcttcaactcataataatgggtatcacacacacacacacacaaaaaccccactttaagtaaagtaaaaacctacagaaaggaagatatgtcagtgatttcagatgagaatctccaaagtgctacaacattaaacattcctacaaccaggaaatggagcaaagtttccacgagcatatcaacacctttaggccatatgctcatgacagccttcatgtttaacatttgtgtcccctttgaggtctcaggttaaaataaagcagaggctttaggtagttggatgcttaatgctaaaaaggtgaagaaaaacagtccaggagcactggcattctgtaaaaagatacacacaaaaaatagtaacaggcaaaatactcaacccttgccttgtttggcactcagcagggaagcgctggtaaggtctccctggggtccctgctctgagtcgcctcccactgcaggaaggggcaggaagggcctcggggcagtggagcagggagtggacacagtctaaggcttgggctccacttgcagctccagctggccctggcccaagtgctttcaccgcccagtgccttacgcgaggttgttactaggtctgaactttgctaggtattctagtgcttctgcctcttcaggtgtccagaacaaagtaaactgatgaacccaagatctggcttgtgttgctttaagaacaattcctagctaaaatcttcaatcctccaagattaacaaggaccaagatgtgtgcttcactgagaccaggcttgatgactcagctaacccacttgcttcaaatattctgggagacctctggagcccgggaggacaaatctggtgtggattaagaaagagcagcttctatttttacctaacatgtcagctgcatatttcaatcctgacagcacatttgttttagagaaatttttatttacaatgcctagaacaaaaaagaacaaaggaagtggacaggttaagaaccaacccagcttgctaatggagttagaaaacacctcccagagattgccagggaaataaagctccggccgcctatgtctacaaaaagccatttcttgtggaacagctcaaaactcagtaaggcctcctacagcttggactgaccaaaacaagaggatgggagagaatcctgtatctttttttttgttttgtttggagacgaagtctcactttgttgcccaggctggagtgcaatggcgtgatctcggcttgctgcaacctctgcttcccgggttcaagcgattctcctgcctcagcctcccgagtagctgggactacaggcacccgccaaccgcccggctagtttttgtatttttagtagagacagggtttcactatgttggctaggctggtctcgaactcctgacctcaggtgatccacctgccttggcctcccaagaaccctgtatcttaaatgacacctaatcaaagtactcactcagaaaatgaaactaaccaaagtgtaaatgacaactctacaatagcataacattcctgagattccacatgaaaatcaataactaataccccacagagaggaagaacctgctacctgctcactcccacctcgaaatagtgactggtatcaagctgtagatggaatgatacagattctaaatcccataatgggaatgcttcagtggacctagccttaagttcagtaacaagtcggggacttgatgaccccatggcatccctatcaacatatgctgctagatgtttccccgaaacctctccctgcaaaactgaagcttctgagaagagctggacgtaagccgtgagcaataaggcctcacaacacggaggagctccctgagcaacccctgcagcacgctggccgctgtggcagtgcctgaccgagcagccaagcgttcggggactcatctcccgccacgtctgcagttaggcagggggcgcaaagctgctgaaccaacatgggaaaggcgtcagaagtgcatggaacctcaaccacagtttaaaaagtcatcaactactcggccaggtgcagtggctcacgcctgtaatcccagcactttagaaggctgaggctggtggatcacctgaggtcgggagttcaagaccagcctgaccaacatggaaaagccccgtctctactaaaaatacaaaattagccggggtggtggcgcatgcctgtaatcccagctacttgggaggctgaggcacgagaatcgcttgaacccgggaggcggaggttgcggtgagccaagatcgcgccactgcactccagcctgggcaacaagagcgaaactccatctcaaaaaaaaaaaaaagtcatcaactactcagtgaaatgctcttatcaagaaacagagttgaaagtaacctactcaggggacacagagtgtagttctcctttgattaactctgaattgtacaagacacaatctgtaactctcccttgagaaaaatgaaatacagttaatacacagtatgtgtacagtacccgcatagtcccagggtgagcagaagatgcactgtcactctaactgctctgtgcatctgtcaatacctcaagtttcaattccttttcttaatgaacaatacagtaaaattaggcatgcatcatctctgattagaaacaaagactgccaactactaatgttccattttcaagacagaagtggaaaggtacatttcacttccagtaaggtaaaagtaaagattacctctacatacgaaatgcaatgcttacatcatctctgtattttgacttgtgaatcaccacggctttggaaggaacagtggattctggtttccggatgttaaactcaggctttggtctggtctgttcttgaagatttttccactcatctaaagtcatctcttgaacttgggtttcttcttctacctccaactcaggaactctataaagagatatataatcataaagaatactttttgatggtactaaaatgtctactttataaagaaaaagttataaccattaattcaacatatttttgtggtactgcatttcaaatgcaaataaggtaaggaaatctttgactcacaagcttccatatttcattttcaacattttatgtcatcactgccaacagaagatacttcctatctgtgttcaaatcaatctttgaaaaatgggaacatcaccatcctgatgacattaacatcacacttcaccactggcactcccttccagacagcatgacagacaaaatgaggtaattatggacaatgggttgaaataaaatacaggaaaccataaacaagttttaaagcagtggctcatgaatgcatacttttgcaaatatcctctttaatgagttttaaaaagaaaacaaaagacagaaatatagattgagagcaaagaattcagagtccagaaataaaccctcacatttacggtcaactgattttttttttccaaccgtggtgccaaagacaattcaatggagaatgaaaagtattttcaacaaatggtgcttgggcaactggatatccacacacaccaaaagaaagaatgaagttagacctacctcacaccataaatacaagagctaaaatataaaactcttagcagaaaacctaggcagaaactttcttaaccctggactgggcaatggtttcttccacatgacaccaaaaaaacaagcaacaaaagtacatacattgaacatcatcagatacttttatactacaaaggacaccatcaagaaagtaaaaagacagtccacaaaatgggataaaatatttacaaataatatatctcacaagggacttgtatctagaatacataaagaattctttatgaacagccaagcgtggtggctcatgccgatagtcctagctactcagggggctgaggtgggaggatcgcttgaggccaggcatctgaggctgcagtgagctatgatcacacgtgtgaatggccactgtgttccaccttgggcaacagaatgagacactgtctctttaaaaaaaaaaaaaagaatgctttatgaattctagatacaagtcctctttagttgagacaaatgaccaccctccccccaaaaaaggcaaggatctgagtgaacatttttccagagaagatatacaaataggcagtaagatgttgcacatcattagctattagagaaagacaagtcaaaaccacagagctgcaccagtccacacccagtgggatggttagaaccaaaacgacatttgacaagcgttggggaggatgtggagaaactggaacccacatacactgccagtgggaatgtgaaatggtgtagcctctttggaaagcagtctggcggttcctcaaaaatctaagctgagttagcctctgacccggaaatttcactcctgggtttatacccaagagaaatgaaaacacacatccacatgaaaacttaaacccaagtgttcactgcagtgctattcataatagccaaaaagtggacacaacctaaatgtctattaactaatgag

SEQ ID NO: 95558 - DNA, 53222 bp, Homo sapiens
tcgcttgaacctgggaggcggaggttgcgatgagccgagatcgcgccattgcactccagcctgggcaacagaagcgaaactccatctaaaaaaaaaagaattaaatgaacagatacaaaatgcttagaaatgattagaaattattactcgtacccagtaagcactatataagattcagcttacaattatccacaaatgtgtaaaataataaatctttcagaaaaagaaacagtatcacatctgtttgtcttataatatgcatttatcagcttctcatctattaattaatttgctgcatttttacttttttttttttgagacagggtctcactgtgttgcccaggctagagtatagtggcatgataatggctcactgcagtcgcaacctccctggctcaagtgatcctccaacctcaacctcccgaatagctgggaccgcaggtgtacaccaccacagctggctaatgtttaaatttttttgtagagatggggtctcatggtgttacccaggctggtcttaaactcctgggctcatgtgatcctcatgccttgggctccgagagtgctgagattaaagtaaaaatgtggccaccacactcagccacatttttatttttaacacatgtaaaattacttgtcataagtacatgtatataaacaagaaattcattcaccaaacaacaaatatttcctgaataaaaggcactgaagatgaaaccagagagaagggaaggaagggattcagaaatgaattagacactatttctaaccttagggaggagaaataaggacaaagaactataatgcaggccaataatccagtgtgacaagaggcacagcaataccacattcatgctcatcatcacatgcaaggaattctgtttgctacctgcccagcatctattcctacctgctggtttagaaaccttattttcctcagggaaccaccccatcaactctcagttccagtggttcagggggtgatgacttcaatcagactccagcttgggctggtaatcaagcctggatgatgagagaattaaatgatcttcagtacagcaactgggttcaatggtgtatgtgtgacccaagacataggcccgtgattcaattctgggacttctgtgcatgcactaaagtcaagtcggccaggcatggtggctcacgcctgtaatctcagcactttgggaggctgaggcaggtggatcacctgaggtcaggagttcgagaccagcctgaccaacatggtgaaaccctgtctctactaaaaatacaaaaattagctggatgtggtggtgcacacctgtaatcccagctactggggaggctgaggcaggagaatcacttgaacctgggaggtggaggttaaagtgagccaagattgcgccactgaactccagctgtggcaatagagtgagactccatctcaataaatgaataaataaagtcaagttggccaggcatggtggatcatggctgtaatcccaactctttgggaagctgaggcaagcaaattgcctgagctcaggagttccaggctggtctggaatttctggagcgaatcactgttcctggtagattttttttttttttattgagccaacaaagtccttggttttacttattccagatgggttttctgttgctcacaacttgaaggatctagaataaatgaggaaataaaaagttctaaatccccaattatttatttggccttgattaaagttacaactagagatcaaacttttaatagtaggaatgggagagaataaaaatttctattggcacaattgctttgagtatacaaagcactaagctatccagtaaccttttgtcataagaaggcaagttggaaagaccctcaatgacaccaagaatacaaatattattagcaggttggggaaattatttcatgatttaaacattgtgtatctgatcatcatgaatggatttccgcttgctagaagttcttctggtgcatcctgattgttaactaatggtttatggttctacaactcctgactttgagcctatgtacttgctacttgctttattcatttgttgtgggaaactgaatttgaactcacttatcacccttagaatagtgaaaccaggaactattatgtaacttcattgatcctgtcataattgactcaactggcataaaagatcagatcctcttagagttaggaaaaatacttttgtttttgcatatattatgcaagtagaaacaattataaaatagtgagatttatttttacctttttcaattgacttctttggtcttgtcttccattcaactatatgaagaatgcaagacaggttataatcatcctaactttagggacaagaaaaaggtaaggagagagagagcaggaattcagcggcaaaacagagcagattgaatgcagtgctttggtaattaacaagaactcacatcctcgccagcctgacctggcctctcctccttggctctcacccaggtgttgctccctgcatgtaattgaaagtaatgaagctacatgtgtctaaactctcaattaatggttctgtgaattccaagtcaatctggaagatgttagtgtattttattattcctaatgggactcctctattaagtaattcaaggtaatttacatcttgtatacagttaagtttcactgcatttccattggtggtaataaataaccactggaatatatataataatcatggaagggctggtagtattattcagcatccacacttcacagcatttttgatgtgctttgtttttccatgctataagatgtgtgttattgtttggtattatgattactaaaagctgttttcatatatcagattatgaaaaagatcagtctattaaactgaccacattaaacacaatgtgtgaataacttatgctaatgtggtagagttgtattttaggaatgcatttaaggatgcaatctcctagaagaaaaaacaatcagtaaaaaatatgagggtgcttaaccttactctcagtaaattgtgcagtagtcaatagccccgtaagaaactcatggccatggccgggcacggtggctcacacctgtaatcccagcactctgggaggctgaggtggacagatcacttgagtttgagagcagcctgatgaatagcaacgtggtgaaaccctgtctctgccaaacacacaaacacacacacacacacacacacacacacacacacacacaaagaaaaaaaagaaaaaaaagaaacttgtggccatctaataccaggtaaggattactcatctctatttcagttctaaagatgttctgaatcctgaagcaacgagagttggttctcttacaaccatttggggcatttgtgacttggaaatgaggcggcagtgctcacagggcatgctttaagaacttacagtggctggttatgctgtaaggaagataagaagaaaacaggggagcaggctaactccagatgcccagtgggaagacgacaggcccttctctcacatgatcatgattccttggtgttgtggtttggtgatgagcagtttaaagataccaaagataactttagcttgaagcagtgcttctcaaagtgtggtctctgttgcatgtagtgattctggttcattgagataaatttactatttttactctggttcattaagataaatttactatttttacaaaaaatttactatttttactaaattttacacaaaatttactatttttacaattttaaagtgtacaactcagtgacatttactaaatttacaattttgtgcaaccatctccactatctcgttccagaacatttcatcaccccacaggaaactcccatgcccattaagcagttactttccaacactcccaacccccacacctggtgaccaccaatctgctttctgtctctatagattctggacatttcatataaatggaatcatacaacgtgtggccctttttgtccgtctttcacttagcacaatgttttcaagtttcatccctgttgtaacaagtatcaatacttcctttttgaccaaataatattttttgtaccacattttatttatccattcatcgggtgacatgtatattatttgtttctgtcttttggctattgtgaatagtgctgctatgaatactcatgtacaagttttggtttgaacacttgcttttaattcttttgggtagaaagcgtaggcattaatctttgctcactcaaaaggagatgaccaaatatcttaaattcttcaatcattcaacaaatatttactgaaaacctactctatagctgcttagaacgccaagcactgggaatacatactgcagtgaataagacaggcatcatccctgtcctccttgggaataacacaaaattcaataagtgagtaacacacagactttacagcatttaggattaggaattcctttgctattaaggaaagtaaaagctggtcacagagcacctggcaagatgctctaactggatgctttcggatgaaacaagcaaacacaactaagcgcaatcacatctgtcaccttacatcataagcctcaagtagggaggttcccaagtgggtccagtcggcagctcaacctcatcaaggatctagcctttctctatcctgctctgccatcctcatggccacgctaaggaacagccacccgaggcatcatgtcttctcatggaacaaagaccagggaacagaagggggggagatcccttctcaatcccttgttaggtgcaagaaaaactttcccagaatacttctcagatctgttctgcccgatttgccccacagcctattcctaagccaattactggcaaggaattggaatcaggtgcaatgaataatgtatgattaatcaagtttgaggctggaaggggccctcttcccctggggaatatgatgcctgaacaaaatacaggctctggaaaaatgtaagagggaaagaacggctgtaggataggcagccaagcgtgtctccaccgctgcctatgcaaagatttcctggaggaagtccagtccggcgttctctaagctccaggcctcaactgaatatctcaaaagaaaacaaatatccaaacctcaacgtgtcccagactgaattaatgattcccgttaaagtagtgtcttccagtggtaactaatactatcattcagatgctggagccaggaaaataagagtcaccgtatcttcttctccctcatcaccacctctagcgcatcaccaagtctttgaatccatctactctcttcgcctccaccgccaccatcctaatcccagtcactatcaactcttccctggagctttgcaacaatcatgtttggcttcccagcatccatttgtatttccctccaaactattagttcacagtgcaggtagggtggccttttcaaacccaaatctgctcatgctcaaaacttgcttcccactgctcttagaatagagaccactttgagcttgaataggctgtgcacatcccacctcaagactgctgcacttgctgttcctcctccaaccccttgtcacccctctccctcggcttaactgtcatttcccaattaggtcagatccctttgctgcagcccgtagagagctctgcgcctgtccttcagggcactttttctccatctacagactcagatctgtgacaacacggagctagtatttcctacaacataatgcctggcacacggtaagtgcgcaatatgtagctgttgcacggctaaatgtatacataagcttcaaagcagagtggcccatagcaaatacggtcgcagtcccgggagaaagcacacacagccgagaccccaccgcttcgtcggcgccgcctggaccagccagtagctccgcccctgggccccgcccctccctgctgagcgaacggggcggggcccagaggtcgcgtgacgtgacagcagccggtcggtgattgggtctccaggcgcgccgtgtcggaaagggggcgcacccgcgcgcgctgaytggctgtctggcgcagcggggcggacggcggcggcgccgcgggggcgggcgccggtaggggccggacagggtagggcccggagggcggtggcggcggagcgggcggcatgggtcctggccgccggcttcgctgagacgcgctcgcgtgggctgccctcccgggcccgcagtggtcgcggcggcatgaagggcgctctggggagtcccgtggctgccgctggcgccgcgatgcaggagagtttcggctgcgtggtggccaaccgcttccatcagctgctggacgacgagtcggacccgttcgacatcctgcgcgaggccgagcgccggcgccagcagcagctgcagcgcaagaggcgcgacgaggcggcggcggcggccggggccggtccccgcggcggcaggagcccagccggggcctcgggccacagagccggcgcgggcggccggagggagtcgcagaaggagcgcaagagcctcccggcgcccgtcgctcagcggcccgatagccccgggggcggcctgcaggcgccsggtacgcggggacagcggggktagcggaccacggctcggcccgctgtgagactggggtcccgggggccggtttcaggaggargggcccgggaacagtagggagagttgagggtcctggtggccgccgaaggtaggaggagaggggcaggggtcacaccccttccagctctcgccagcctcgtgcggggctccgggggaaacgctggcttggggtgggatagggccctcgaaccctggcactgaggctctacggcaagttggacgaagttgagggaggttgtctgggtggcgtgtgggggcgaacggctgaggtcgctaccccggggctcccacatccagacctggcggggaccttcatcttccagcccagcctctgcaagattgaggtcggagccacccgagagcgcggtggggaggaggagggcgcctggtcccggggctgggggcctctgtgatgccggaggcctgggcgaccgcggggcggcctgtgacgtcggggcccgggcgggggtccccggcgcggtccggcctggcgccttcgccccttctccgtccggtagcttccaggaggcagccggcatcgtatttcagtacttcgtgtggtgttgatgggatgtgcaacttataaatagctcaaggctgctttaagaaaagcgtttttaacctttccagcaagaatattcggagttccccactccctatttagcaagaaaaaccggtgcgcagcgtggtgtcctgctgcctgtggacggggagggtgcttcagagttcattctctcaccgaactgcgtcagtggcagagccagcaacactccacctgtgtttcctgttttcttgaaatgaggcagcggtcccaaggtttgcagagtgttaggattaagatgtgtaggttgaccattcctgccgacgtttgccagtgtgttcaacttggctttattggtttgttccttgcttgataaaaattgtgcatcgcagccctgaggaaacgtctcaggtttaagtattagggctttgatgtgcagctgggtaatgtttacctttatttgtgaaaagctaaatccagagtcatcacttgagaatcaagtcactacaataaagatgttgaaaatgatttttaaaaaaatgttatttactatctcacgacactttggtaggccagtaaatttctgagcctatctaaacagtgagactggagatacattgtgcattttatatcctgttttttatctttttctcttaaacttatttacatcaatataataaaggaattgaggaaggctaagcttttcttcaccctttattttttaacaaatgaaaatgccgggtgtggtggctcacgcctgtaatcccagcagtttgggagtccgaggcgggcggatcacgaggttaggagatcgagaccatcctggctaacacggtgaaatcccgtctctattacaaatacaaaaaattagtcgggcgtggtggcgggcacctgtaggtccagctactcgggaggctgaggcaggagaatggcgtgaacccaggaggcggagcttgcagtgagccgagatcgagccactgtactccagtctgggagaaagagcgagactccgtcacaaaaaaaaaaaaaaaaaaattctgtgcttcagaaaaacgtgagacgagttagtgctgttaatacattgatttttagcctttttaaaattgtcatgcatttttgtgttaagaattttaagcaattccaaaatgtatgaggttaagtgaaaatcctcttatttttcctactaacactttgcatttatatacataaatgcacagagctatttcttttctttctaaacttaaatgatataaactgggttgcaacctgtttcctgcacttgatgttgtcatgtagtacactcgtaactttttttttctgtcagttgttaggtctaagtgatctggcttttgaaatcaactaaaggtatttagttgattttgtagttagaacggaaattttatcattcaagttctttttcaagtatgtgttatttcaggagcaaacagctcattaatttccatttatgtagttactgtactaaatttatctataatgggtgtcaaggagctattctctcaaggttttgtaaccctagttgataagaagcactgtacttttctaacattcaaaattttttatctagttagaatgttgtaagtgaatgcttagtgtagacaaaaataaaacatgtttgacatatcatagaaatgttaatcctgaaagaatgtggaagtcacaagcttttcctatggaaaagggtttttttttttttttttttttttttgagacagagtctttttttttgagacaggctggagtgcagtggcatgatctcggttcactgcaacctctacctcctgggttcaagcgattctcctgcctcagcctccttagtagctggcattacaggcatctgccaccatgcccggctaattttttttttttttttttttttgagacagagtgcagtggcgggatcttgactcactgcaacctctgcctccccggttcaagcgattctcctgcctcagcctcctgggtagctgggactacaggcatgcgccaccatgcccagctaatttttgtatattttttagtagaggcatgggttcactatgttcatgttggccaggatggtctcgatctcttgacctcatgatctgcttgccttggcctcccaaagtgctgggattacaggtgtgagctactgtgcctggcctaattttttatatttttaatagagatggggtttcaccatgttgtccaggctggtcttgaactcctgacctcaggtgatccgcccgcctcagcctcccaaagtgctgggattacaggcgtgagccatgatgcctggccaaaaatgtaggtttttaatgtctgactatctgtctagcaatatgtatataaacccttgggtgagccttgctcaataagttcattcttaaagtcatgagaggccgtttcagttttgcttttcctagcctttcagaattatgttctttgaaacaaaggtcaattttattttgtggaaaatcttactgtaaattttattgtattctgtttctttacctgggcttggtttagatgatgatgaatgcatgtgccagccttttcttggcgaggttagtgaaatgcagtgcttgcattctccacttggagctgctgatccagcacagaaaaacaagcccaattcatggcagtgttgatctcttagtactaaattgtggggaaaaaattggatgctgattatctttgttttgggagagttgggaaggagaacgagatgtttgcccaaaactgatcattattctaattatctttgttttggggggtttgggagggaaaatgaaatgtttgcttgatattgataattattctaataagtagccaattgtatttaacagttttcagttttatactgttggaaaaggctttaatatggtgtacagtaaatgtcctattttaagtttgatgaattccaaatttgacgcaattaaaaaataacttggaggaagcagaaaggtgggataagcacctataagtaattctgtagttgagtggagataataaaagatgtttttaaaactatgggttggaaataggaaatctgaaactatgttaaaataactctttttacgctggggtaaaagtatggaaaagtattgttactgttgacaaattttctgatgactgttatgtcatgatctgttataattttcaacttgttaggtaattaactttcttagtggctttttctgccttacattttgaatgccttttccagttctgaactcttttttttttttttttttttgagacggagtctcgctctgttgcccaggctgaagtgcagtggcacgatcttggctcactgcaagctccacctcccgagttcagccattctcctgcctcagcctccccagtagctgggactacagacgcccgccaccacgcctggctaattttttgtatttttagtagagacagggttcaccgcgtcagccaggatggtctcaatctcctgatcttgtgatctgcccgccttggactcccaaagtgctgggattacaggcatgagccaccgcgcctggccccagttctgaactcttaataaagcacgtgcccccagatctgatgttgcacactcctaggcaaccgggcacaagtgtcagtcacagtgggggctgcgtggtggctcacgcctgtgatcccagcactgggaggctaggcgggaggatcactcgagctctggggttcaagaccagcctgggcaacaaaatgagacctgtctctacaaaaaaaaattttttttttaattagctgggtgtgatggtgcagcctgtagtcctggctatttgagaggctgaggtgggaggatcagttgagccccagaagtcaaggctgcagtaaactatgatcacaccactgcagtccagcctgggtgacagagaccctgtcgaaaaaaaagaaaagtgtcattatcttgatatgtctgcaatcaaagcataatactctgctgggtgcagtggcttatgtgtgtaatcccagcactttggcaggtcgaggcaggtgggtcacctgaggtcaggagttcaagaccagcctggccaacatggtgaaaccctgtctgtagtaaaaatacagaaaattacctgagcgtggtggcacaggcctgtaatcccagctacctgggaggctgagacttgagaattgcttgaacctgggtaacagaggttgcagtgagctgagattgtgccactgcactccagcctggcagtctgggtgacggagtgagactgtctcaaaaaaaaaaaaaaaaaaaaaagtggccaggcacagtgactcacacctgtaatcccactactttgggaggctgaggcgggtggatcacctgaggtctggagttcgagaccagcctggccaacatggtgaacccccatctctaytaaaactacaaaaaaatgacctgggtgtggtggcaggcacctgtaatcccagctactcaggaggccgaggcagtagaatcacttgaaccagggagttggaggtagcagtgagccgagatggtgccatggcagtccagcctgggtgatagagtgagacttggtctaaaaaaaaaggcaggtgtagtggctcatgcctgtaatcccagcattttgggaggccgagaccggtggatcacttgaggtcaggagttcgagaccagcctggccaacatggtgaaaccccatctctactaaaaatacaaaacttagcccggtatggtggcacatgtctgtaatcccagctacttggaaggccgaggcaggagaaatgctttaacctgggaggcggaggttgcagtgagccaagatcacaccattgtactccagcctgggtgacagagcgagactctgtctcaaaaaataaataaataaataaatgaaacattatgctccacttatgataacatctttcccatatcctaaacatatcacaagcctcagattatgacctcactacaggatatgaattgaatttaaatatttctaggttatgggaaattaaaattatagtaggttgaatttagatctgttgtgcagctttcacacttgaaaaaaatactttaacaaggaataaattatataattttatgttagtgatgtcataaacatcatttttgctttaaaatgagaccggttaagatttacctgtacccagatgataaagttttggtagaaaatattaaatgggaaaatagaaaagtgtgtatctacatatattccttaaggtcttatgtgtatctaagtgggagggaagtctaatagttaaaaaatataactgtggccaagggcagtggctcacgcctgtaatcccagcactttgggaggccgaggtgagcagatcacgaggtcaggagattgagaccatcctgggtaacacggtgaaaccccgtctctactaaaaatacaaaaaattagctgggcgtggtggcgggcgcctatagtcccagctactggggaggctgaggcaggagaatggcgtgaacccgggaggcggtgcttgcagtgagccragatggcgccgctgtactccagcctgggcaacagagcaagactccatctcaaaaaaaaaaaaaaaaaaaaaaaaaaaatatatatatatatatatatatatatatatccattaacttgaataaatgtcatagctatacaactaatgtggagagtaatttgtaccaagaaaaattgaagccactatagtaaatattgcacatagtgagaggagatcttttaaatgtatataaaaaaagatagactttttttgaagattaaagatgtgacaaagttctccacaatgtatttaccaagtattagatggcttcaaacatagactttgcttaagatgtttaaagcattaaaactaaaggggagtaaagcaaggtgacaggacagaggaaaagaccagagtctcrgccgggcacggtggctcacgcctgtaatcctggcactttgggaggctgaggagaccagcctgaccaggttagagaaacgtcgtctctactgaaaatacaacattagccaggcgtggtggcgcaggcctgtgatcccagctaatctctacccgggaggcggaggttgcagtgagccgagatcgggccattgcactccagcctgggcaacaagagtgaaactcagtctcaaaaaaaaaacacaagaacaaaaccagagtctgtggtcccagcacagtgtccaagtgctggactgagtggacaaaaagagatgccctcaagtactggctgactcttgggcaagttgccaaatagcagtgtttggttcatattcaggaagttataaytgcaagtctatatatctcatagaatagcaggaaaatctgttttcaaagtaaaaatataagcactacaaactttaaaaacaaaaaccttggccaggcgctgaggctcatgcctgtaatcccagtgcttcaggagggtgaggtgggtgaattgcttgaagctgggagttcgagaccagcctggccaacatggtgaaaccctgtctctattaaaaatacaaaaattagctgggcatggtggcacatgcctgtaattccagcatcttgggaggctgaggcatgagaattgcttgagcctgggaggcggagattgcagtgagccaagattaaacagtgcactgcacttcgggctgggtgacagagcaagactctgtctcaaaataagtaattaagtaaataaattaaaaaaatacaaaataaaaacaaaaaccttagtagccagtgataagccatagttgctatgtaatgtgcagttgggattctaaaagtacagtctgaaatatagggtattctttcattttctaggtacggcttacacactgtgtttttgtaagactgcttttgtgaactgtagcttatttagtaaaatgtacccatggctgtcacagttattgggagrtgcctgtaattataggtgagcttagttggtcatatactttctaggatatagggaaagcatgatttaatagtaacatcctattaaaaagtagactgtgggcagttgtagtatcagcaacttttttctttgaagttttctaaacttcctgaattctcctatgacgttgatttctagaaaaatgaaatttacaagtacctgtaaagtttaatagtgtgctgttgcagatgttgtgttccagctctctgctttgattttctgttggtaggccagaagcggactcctagaagaggggagcagcaaggatggaatgacagccgtgggccggaggggatgctcgaaagagctgagcggagatcctacagggaataccgaccctatgagacagagaggcaggcagacttcacagctgagaagtttccagatgaaaagtatgtgctgcagtcctcagcagggcgggtggggaaccagaaaggttttgagaaaatgctactttctttttcttttctttctttcttttttttttttttttgagacagtttcgctcttgtcgcccaggctggagtgcaatggtgcgatctcggctcactgcaacctccgctcccgggttcaagcaattctcctgcctcagcctcccaagtagctgggattacaggcatgtgccaccacgcccggctaattttgtatttttagtagagacggggtttctccatgttggtcaggctagtcttgaactcccaacctcaggtgatccacctgccttggcctgccaaaagtgctgggattacaggagtgagccaccatgcccggcccagaaaatacaactttctactggctactgctttttgtggtaccagtcctaggaatgttttactaatttatgtgcaattcatgttaccttagatgatgggaaggatcttcctttttcctcatagatgcctttacgtcttggttcaggaaatgattgtacaattaaaaatgaattgcttgttggtaactgaagagcactcttaaaaagaaattacacaggagtgtgttgaactggttttcttttgaagttctagattagagatataattttggactagggatataattatggtttttgatttcacattaccaatttagactgctcaatggattgaaataaattcctagctccacggtcaggtcagtaggctgccatgatgaaatttgaagaagagtctgttatgatgtgtaataccaatttctggagggcatggctgctctccgaagtactctaacatggacagaagtcgtgggctggtggagtgttgcgtcgctgcttagtgatgtggcagcatggtggccaccgcactccacctcaacacggggaggggttgtgtcttatgyttggcacttgctgcttaaagtctttgtttaatcattaaacctgtttatgttaaacagaaacaagtagtgaatcacatttcaaggaaaataaagttaaacaagctaaggaagactagaatagtgaacagttatatgtcaagggagccatttttccaaactctttctgcttcttgactgctaattccattccatttaggattctggctacaagttttaaccaaaaaatgtggctttgtaaaactatactatagagcctattaaaaacaaaacaaaacaaaagtccagcagagagtaacttagcctgggtgggctgagcaggtgatgactcatgcagaactgttcacctggaagttacacattcaagacattgagatagtctatctgcaaccatgttggagggagaaacttacagaaagccttaattttgcaccttttttggtgattacttcaaatctgctgtgtagtaagcacagtctccttgtttctgcaaagcttcttgtagcagagctgcttatttttggaagcatttgggtatttattttcccctcactttagggattctgtggaaatgaggaaattatagttcacttgcacaaacccatgtttccccccttttttagtagcaagactgtgtagtctttaaaaaggataaaatagatctttatatgtgacatgaaaaaatagctattaagtgaaataatacatatatggaagagtaaggtgggatatggaattatggaggggttttttaatttaaataaggtcagaattacagaaaagttttaagaattatacgaagaatttccatctgcccttcgagaccccccacatactaactgtttaccacatttgctttatcattcatcccccaccacaccacacagcctttctttgttatttgagaataaggtgtaggaatgtccccttactcctaaatactttaaatgcatttcctaaaaacatgatacaattttcaaagtcattaaaatgaatacaatactgttacctaattctctaaattacggagtctacagactttactcagatttcaccaattgtcccagtgatgtcttttcacaaaagagaaaacatttctgcttcaggatccactccaggcaaatgcattgtatttagtcatctttaattaggaacagctccttagccttcctttgtccttatgaatttgacatgttgtagagtatgagccagttattttataacatgtcccagattttgagtttttctgatgtttcctcgtggaatgaggttacgcacttttggcaggaatgccacagaagtaatgtgttctcagcgcatcgcagtacagatatgtaggggattttcactttcagggaaatctgaatcttgatatcagaaaacattttcttagtttcttaaaaaataccctcaataaataatactcttaactaataataaaaacactcttaataaataaaacatataaagttttatttgtgacaaactcacaagcaaaaggaaggaaaataacatttgagccaagcatcctgctttatagacttgtgattcactgtcttacaacagtcctagcaagtagacatgatgcctgtttcacaagtgggaagcctgaagcccatgaaagtatgaatgaggagttcagtgtggataccaagtttcagtttgaaaacataaaaagttctggagaagaatggtgatgatagttgcacaacagtgtgaatgtacttaatgccacagaactgaacactgaaaaatgattaaaatggtaaatgttatggtatgtatattttaccacaatttgcttaaagcttgttaataatggggggagggtaaacatctgagggattttttttttcagaacaggaattgattttaaatgaccagtaaactacagaaaggaagagccaaaattcatctagacagaggcagactaatctcctaatagtctgttctaagagttcagttaagtttatttggagcctaaggaaaaattcctactgcattaaaaacagtagtttactcccagaatatgtgcaccacatgatatagcagatctcgggggcggagacatgcccgttaatcccagcgccgtttatgacattgcttccgtgggaaaacacgttctctgcctgggtagaatagaaatccatgrcagctggctgtgacaagactactacacacattgctgaaactctgggtctgttttctcattgaaaaatggagagggctgaatttagataatctttcgagattataaagattcwataattctgtccaataaacatgtataggtattaaagaaactcaaggtgacaccctttttcactatcagatgagcaaagatcaaattttatcatattcaagcttggggaaagtgctataagaaatgctcttggcggcacagtggctcatgcctgtaatcccagcactttggggaggctgaggcaggcagatcacctgaggtcaggagttcaagaccagcctggccaacatagtgaatccccgccttattaaaaattcaaaaattagtggggtgcgcctgtaatcccagctactcgggaggctgaggcaggagaatcgcttgaacccaggaggaagaggttgcagtgagccgagatcatgccactgcaatctatcctgtgtgacatagtgagattctgtctcaaaaaaaaaaaaaaagaatttgtaggttgggcacagtggctctcacctgaaatcccaacactttgggaggcagaggcaggcagatcacctgagctcaggaattcgattccagcctggccaacgtggtgaaaccacatctctactaaaaatacaaaattagccggatgtggtggcacacgcctgtgatcccagctagtctggaggctgaggcaggataatcgcttgaacctgggaagtggaggttgcagtgagccaagattgtgccacgtcactccagcctgtgtgacagatgagactctgtctctaaaaaaaaaaaaatttgccaggcgtggtggtgcacagctgtgatctcaaccactgaggaggctgaggcatgagaatcacttgatctgggagtcagaggctgcagtgagctgagattgcaccacttcactccagcctgggagacagaacgagactctgtctcaaaaaaaaaaaaaagagagagagtttactgttggctgggcacagtggcttatacccgtagtcctagcactttgggaggcctaggtaggcggatctcttgagcccagtaatttgagaccaacctgggcgacatggtgaaacccgcatctctacaaagggtagttagccgagtgtggtggcacatgcctgtagtctcagctgcttgggggactgacatgggaagattgtttgagcctgggagatcaaggctgcagtgagcagtgattgggccattgcactccagcttgggcaacagagtgagatactgtctgaaaaaaaaaattactgttacttttcttttgttttagaactgtactttagatttctttttttgctctgtttcccaggctggagtgcagtggcaggatctcggctcactgcactcctgggctcaagtaatcctcccacttcagcctcctgagtagctgagattaccaggcatgcaccactatgcctggctaatttttatattttttagtagagatggggttttgccatgttgcccaagctagtctcgaactcctgggcccaagcgatccaactgcgttggcctcccaaagttctgggattgcaggagtgagccaccactcctagcctgctttagtttttttatttttatttttaagacaaggtctcgctttgttgcccgggctggagtgcagtggtgccatctcggctcactgcaacctctgcctcctgggttcaagcgattctcctgctgcagtcccccaagtagctgagattacaggcgtccgccacaacggccggctaatttttgtatttttagtagagatggggtctcaccatattggccaggctggtctcaaactcctcacctcaagtgatctgcccgtctcggcttcccaaagtgctgggattacaggcgtgagccaccgagcccagcctgctttagatatttgctatagtttaggatcaggttttgctttagatatttgctatagtttagaatcaggttttggttacaggaggtgggagacagaaaagccaacttggagaatttatttaagttgtgtttcttataagagactggcatgacgttaatgatcagtacttctgtatttctttattttttgagtaaggaagattgcgagttttgtatacttttacccactattgtatagcggtttcttaatgtaacacttttagccataaaagtagattgtaacatacctctactgctggtgtttgagctactaatgccactaggtttcttgatgccaggacctccattaaataagtaatttcttgtgattttaaatgtttttaaaagcctttccaaattagaaaacatttattaaactattgttacaatggtgaaaaagagcttagagcttagtgaaggagagacaagtcctcagaaagagtgctggtgcccagcgacggtgcagggaggagtgggtgggcaatcaggtcctgggtccaggctctgatgtggcagaggaagaagagggaggagtggcttgggctctcgctcgtattgtgagttgggaatcacaggaggaataagggctccgcgttgggcatgtgtgtgcctgacttggggatgtccgggtggagatgtctaggaagtaactggcttcatgtcctgcaatcagatgagagacacagggccagttagcattagcatggggggccaggcggatgtggcatgagccgagatcctgccactgcactccagcctgggcaacagagcaaggctctgcctcaaaaaaagaaatctaaagtaaggttctaataaaagaaaagtgagagtgcccacaaggataaggacagatgggtatccgtatagagcaccaagacaagtggttaggcacgagaggcagacggagaacttttcccttctgtgaatcttgaattggctgcctctgagaagtggaattgcgtggctgaggaacaatgtgagttttgtaccatgtttgggtattatctattccaaaaataattttctaagggcaggcagaaaaagagaagccagaaagtcaggmagattggtggccaggagtgtcatatgacactggggtcaaatgacatgaagacaaaagttgctattgggcttaaagaggtcttcagctgcccttggccgtttatgtggagtaatgaggtggaaggcaggttaaggttttcacagttccaaatgttaccggctggttgtgtgtttaggagggagatttggaaaggggcataatttgaagtttaaccatttttcttacacaaaacattccaaatttaacttaaagatttggtattagaacaggaatgaacgttagaatttatttatcaacattctcattttttgagtaaggaaactagatccagagagagaaaggaatgccccattcagattagtactatgcctgtctagcacctgcttctcctggactggccccaccacttagcctactctctgcttccgtttcctcatctataggcaataattgtatattaaagatttgtttgtgagaatccagttactatatgtaaagtgctcagaacaatgccaggtatatagtctatagtatgcgctcactaaaggttaactattaatttgtgattcaagccaccattctttccagtatactataaccatgattttcttttagaatttttttctggagagaccttagacctttaatttaccagtttttatyatatccactccttcctagaccaggtgataggtttgatcgagacagaccrttgagaggacgtggaggcccgagagggggtatgcgyggcagaggcagaggtggccctgggaacagagtttttgacgcttttgaccagagaggaaagcgagaatttgaaagatatggtgggaatgacaaaatgtaagtttctttgtaaatgctattttcactttaagatggtgtcagcacgtggtatgaatctrttatgtgttaatatttagttaactttatagtactgtgctgttattcttgtgagaagctgatcctgggacttttatgaaccactctttctgatttggagattgactggagactagcttctggtttaagggactattctttctttccgtagagcagtcagaactgaagacaacatgggtggatgtggagttcgaacctggggatcgggtaaagataccaggtacggtgtaagtgtgtgccctctgagaacctgcaattaagtggaaatctctggatctttgcttttcttgaaaatgatgtcttctgtattgtgctttatacttgtgtgcccctaagtagagattgattttaggcttttgtttcgtgagataagtttttaaaacaggtttgctatgttgcagttagatttaaactgcttttaaaattctattactttagccaaacaaatttgtgacagatgaccatgtatttgctgatgcctcaaacatatggcactgtacatttgcacatgcctcaaaatgctttttgttggctgcacacggtgactcacgcctgtaatcccagtactttggaagccaaggtggacggatcacttgaggtcgggagtttgagaccagcctgtccaacatggtgaaaccccgtttctactaaaaatacaaaacctagcagagcatggtggcaggcacctgtagtcccagctacccaggaggctgaggcagaagaattgcttgaacctgggaggcagaggttgcagtgagccgagatggcaccactgctctccagcccgagtgacagagcgagacacagcatctcaaaaaaacaaaaaaaagctttttgttttgttcattattttttaaaatggtgacaagatctcactatgttgcccacactggtcttgaactcctgggctcaggcagtcctcttgcctcagcctcccaaagtgctaggattacaggcatgagctaccacatctggcctaaaatgctttttaaattcctggatattctatatgtttttacctttcaaagttcatgtggatccttgacacatcttcatttcataaaatcatttgtagattgaagcttagtgacaggtttcacctgaggctcaagttggacatttctctgaggcttcatggtgccttagatctgtgccaattcttctgctagttagagtggatacatggttctgctctgttttatttcacagctggagggatgatgccttcctggtgtctgcagaagaagaggtagggcatgctgcaggcagtgcagtgtgagcagtgctacagggcaggcttcccgctagtgcagaggcttgaggggatccaggcttccacttttcttcttttgaagaatataagcttttttttttttttttttgagacggagtcttgctctgtcacccaggctggagtgcaatggcgcgatctcggctcactgcaacctccgctgcccaggttcaagtgattctcctgcctcagcctcccaggtaggtgggactacaggtgcacgccaccatgcctggctaatttttgtatttttagtaaagacggggtttcaccacattggtcaggctggtctcgaactcctgacctcaggtaatccacctgccttggcctcccaaagtgctgggattacaggcatgagccactgtgcctggccagaatataagctttttacatgaacttatttttcttaaattgttgtccttaaagacaaatgtacaaactaatatcaaatgtaacagcgttagatttactaccattgctcatttgtgttctccttgaaaagaagagaaacttgttgaatgtttctctatctggggttccataggatcttgatgacagatcttttaattttgttttattttactttgataatatattttaaaaagtaatataggcactttctttccttctttctttctttctctttctctttttctttttctttctttctttttttccttttttttttttttttgagacggagtctcactctgtcacccaggctggagtgcagtggtgcgatctcagctcactgcaacttccacctcccaggttcaagcaattctcttgccttagctttccgaatagctgggattacaggtgcccgccaccacgcctggttaatttttgtgtttttagtagagatggtgtttcaccatgttggccaggctggtctcgaactcctgacctcaggtgatccacctgccttggcctcccaaagcgctgggattacaggcgtgagctaccgtgcccagcttgggcaccttctttcttcatcatctgatttaccaccttatctaatactaccacttcatttcagtttgcctttgaacttaaaatcattttggctctaagtggttacttatcctagagggccagccttggccttgtaatgttaagaggtgaccacttgtggccctggcaggctggcatgtctcagtgttaaaatgacgtgtgccccatggcactcattttggattggtttgtgagttataaagtcaaagctcttttttttttcctctctctgtctctaagacagggtctgactctgttgcccatgctggagtatggtggctcaatcttggcttaccataaccttgaaaccccgggctcagttgatccttccacctcagcttcccgagcagctaggactacaggcgcatgccaccacacccaccacacccagcatttttttttttttttttctgagacagagtctcactctgttgcccaggctggagtgcagtggcatgatctctgctcactgcaacctctccctcccaggttcaagcgattctcctgcctcagcttcccccgcagctgggactacaggcgcatgcaaccacgcccagctaatgttttttgtatatttagtagagatgggttttcaccctgttagccaggatggtctcaatctcctgacctcatgatccgctcacctcagcctcccaaagtgctgggattatagacgtgagccaccgtgcccggccttttttgtatttttagtagagatgcaggtctgccatgtttcccaggctggtgtcaaacttctgggctcaagcaattcacctgccttggctcccaaagagctaagactgcaggcgtgagccaccacactcagctagtcaaagctcttaggtggttataatttgtaatggaaagcttttcttagaataagactaatttcttaattaataaatagagataaattttatgtatgtatacatatacttcatacatttcttwataaagtgagtaagaaatttatttcttagtaaatcggcttgaggtcatgaaaatgatgtatgcgaaggagttatgtgctacttttgattagtgagaagaaagtggaggtgagcctaacacagtaagtaatgtgtttgtggctggcaaagcccaagtgcttcccagtgtattaaaggtgtaagggctttgctgtagtcgagtattcctatttgaagacgctgacagcaataactggatttaaggacaaagtgccttcaaactggtatgactgagccatttcagtaatactgcttttcttcaacagtttgacagcggtaaaatagaattttttctatttatctgtgctgaaatagaatttttccatctgcaataatttaaaaagtgtatcagatattattttcttgttaaaattggagtagacacccatgaacgcagttttcaataatgctgcctttcaacttttattgtgaagagcaagacagttttatttgttctcaaagcaaaatttgatgaaaatctgttgttgtcagagatttgattaagtttgaggtctgattaaatttgaactaggtaacaaagccttgaagtgtgtaacatcattttatggaacatatgtgcacaaataggcattttctgcactagtacaaatgaagtcaaaatatagacatgggccctggggttatatctttcttctgataaatccaacattggtgatttacctttttttcyttttttttgagacagagtctccaggctggagtgcagtggcatgatctcggctcactgcaacctccgcctcccgggttcaagtgattctcctgcctcagcctcccaagtagctgggactacaggcacccgccaccacgcccacctaatttttgtatttttggtagagacggtgtttcaccatgttggccagggtggtctcaatctcctgacctcgtgatccttctgcctcggcctcccaaagtgctgagattacaggtgtgagccaccgcgcccggatgatttactttcaacaaaatagcagaacctgccaaattaattgctgctaattttgaaacttaattgtctttcagttttgatcatacagttctatgatagctgtaggcacaatattttatattcatttataaaataggtcaacataggaggacatctatgatttttcttttctgtaaaatcagctaattgctgaagtttaagaaatactcagttttttgtggttcatgcctataatcctagcacttaggaaggctgaggcagatggattatttgagcccaggagttcaagaccagcctgaggaacaaagtgaaatcccatctctacaaaaaatacaaaatattagccgggcatggtggtgtgcgcctgtagtcccagctactccagaggctgaggtgggaagttctcttgagcccgggaggtcgagactacagtgagctgtgatggcgccaccgcactccaaccaccatgcccagctaatttttgtatttttagtagagacagggtttcaccatgttggccaggctggtctcaaactcctggcctcaagtgatccaccctccttggcctcccaaaatgctaggatcacaggcgtgagccaccctgccggcctggaaccttcattttaaaaaacaaaagttaattattcaagttttgttttaaaaagagtgagtttttaaagaattgatttcagtaggttggagttgagaatttaatacttatttaaattgaaaaagtcttttctgttattgtagttcaatttgtggttacttttaaaaaaaaacttactttaaagccctcaataggccaggcacagcagctcgtaactgtaaccccagcactttgggaagtcgaggtgggaggtcaggagttcgaaaccagcctgaccaacatggtgaaaccctgtctctaccaaaaatacaaaaaaaattagctgggcgtggtggtggacgcctgtaatcccagttactcaggaggctgagggaggagaatcacttaaacctgggagggaggttgcactgatccgagattgcaccactgcactccagcctgggcgacagagtgagactcagtctcaaaaaaaaaaaaaaacccaaaaaaccaaaaaaacaatgttttctccttcttaaacatacaaaggcattggtatgaatgtatttgtgtgactagagagggtcttgctgtttttcagtgatgtggagccaactgcaccgatggaggaacccacagtggtggaggagtcccagggcaccccggaagaggagtctccagccaagtagggcattttgttcattccccattgtggtgttggttctcttcttaatgatttcttttttttttttgagatggaacttgctttgtcacccaggctggagtgcaatggcacaatcttggctcactgcaacctccacttcctgggttcaagcgattctcctgtctcagtctcctgagtagttgggacaataggcgtgcgccaccacgcccagctaatttttgcatttttagtagagatggcatttcaccatgtcggccaggctggtctcgaactcctgacctcaagtgatccatccgcttcagcctcccaaagtgctgggattacaggtgagccaccgcacctggcctttcttgatgatttctaagagctctwmacagactgggaatctcaaccccttatcctatcacagagggctgaccttaatgtatgaatgactggtgatcaaactaattaataattagttcagacaacctaatgaatatcaatgataattaatgggtgaaagttgggcattctgtcctctgctcacaagctcttttccagcagcttgttaaattccttgacttggagtagcctgactcttgtatggacctctagtgtcttgtcccctctgtgctctcccagtcctccctccctctcttttcattatgtagcttagataccggctccgtctccagcacccttycaagttctgtttttctggggttttttttgagacagagtttcactcttattgcccaggctggagtgcaatggcgcgatcttggctcactgcaacctccacctcccagattcaagcaattctcctcctcagcctcctgagtagctgggattacaggcatgtgctaccatgcccggctaattttgtatttttagtagagacggggtttctccatgttgatcaggctggtcttgaactcccaacctcaggtgatccgcccatctcagcctcccaaagtgctgggattacaggcatgagccactgtgcctggcctccaagttcttaaatacccatgcgccttcaactctctggccctttggacctgctgctgtaacttgctagcaaaacccctcctgggtgactccactatctgccttctctctgcctgttcccacaagctgagcactacaagtcacatcgtgggcctggttggaaccccagtaaattcccggtcactgatattctgaaaccaggccttggcgatccccggttcttgggttcactctttctctcaccttctctaatgactgttttaatttctcctcaaaaccctgacactgcctcccactgtacccttccgccatcgtcctctttcattttctggatgcaacatttccttctatatcacagagtaattatgatccattaggtggcaacttcatcatcctcccactgccaaagatacaagactgctacacctgcacgcctcctgggctccttccctcgtgctaaccatcgggctgccatcccccccgacctcttcacgcttcagatctttcctactgacttcatgaaaacttcatactgttagttagctccttccttttttggtatattcatctccttcctcccaaccctagtcttccagtcagcatttaaacatgctcagtctctcctgcgtaagtgtcctctggaccccacattctccgtcagctgcctctttcagagttgcatgtggccttcttcacttcctcccctccacttattcctccctttagtccaggcctggcttctgtcctcactgtccttctgaaacagtcaccatgtctccagatctaatggatgctgcagtctgcgtctttcttgacctctcagaagcatttgactttattgatttcttcgtaaacgtgctctcctgttggtttctgtgatcactctgctcttcttttccttctgcctctcagcatctcctttgcaggctcatccttgtctttcgggtcttttaaaatgttaagttcttcagggccctgccttaggccttctctttctgtagagtttctttataggatcttatgcacttctgtgacttaaattgtcgtttacacactaactctggaatatgtatctctggctcttaacttcaatgtgggctccaggcctgtggctccatctgcctactggacactttccctgggacatcccagatgctcctgtgcccagcctgaccgagactgagctgactcctccccacacctctggtcctcactcagtgtttccatccaactgtacaaaccagaaacctacgagtcatccttggaacttctgtcttcttgaccstcctctttccaaaacccagtccttccctctgctctggtgattgtacccctaaataccgagcatcaccactcaccagcgtcgtctaagccattgttatctggaccaccactggagcccctcacagggctccctgcatcctcacctacgccaaggtggtgttcacaccgcattctgattgtcatgcccccaccccttgcttaagaccctccaatgtcttcctgtcctttttctgtcccctgttctgacctgcagagtcctgtgtggtctggcccctgcaaaaccctcaagttcagacattcctgtgccttctctgggttcaccatgaggcctttatttcatgttctcaaatgtacttttatcccacccctgccctcacacttgccatacagctttcacaagtgttgtttctttgttttcccaaaccccctttactcttcgcctatctgtctcttactcatccttcagctgccaaaaggcagggtgtctagtggttaagagcacagacattgaaccagtgtgatgagttgaaatcccagctctgccacttactagttgggcaagttatttaatttctttttcagtggctcagttttcttcatctgtaaaatgggaataataacgtacctacattatagggttcttgtaaagattttgtgtgtgtgcgtgcgtttatatctgtgtcctagagtggtgcctggcatgtagctagtgctttatcagtatctgctcttattattgttacttacttcaagagtgaaaggccacagtgattgatgattgtgaaagctgtattcaaaacaattgcaatgtattattcaaaacaagaaatgtgtttcattaaataaataggagtaacagttaatatgaatatttagacagtgagctaactaaggaactagattaacagtttatatgaatgttgagaaagttaactggataccttcaggagaacattatatcctttttgagccaataaacatttatacaaattcaggtaatataaggcagaataatagagagtaaattatagtattgttctaatctatagaattgattgagatactctagtattcataatattagacaaaaatatttagtcactgtgaaagaaaataaagcttgttgactgtctgtctgcagtatcccaggagagctagctggaaaatctttctctctcttttctgctgacctggggggaaagtgagcatctatttggaattgcaagtgcaatgcaggtattgagtgaccgtgccgagagattcttttttctgcactgccttgtcaaattttaacattattactaaaatttctaataatacaattataattttttgatactctaaaagttgggctggtatccgagaaatacattgagtgatagcgatgctctctggtgtcagccctgtttgaatgttgattttgcactctggcttctggcatttagcctgaatgtacattcagtgtacctctcagttctagaatgtcttgatagatgaatctaatgtactctcacttatgttcaaacacacaacccaaagtgcacttccattttcctcaaataggacatattttactgataattatatgtgcaatgcccttccatccttccatcttctcctttcattacagaagtattaactgttccttgttgcatagtgttctagtgtccgacgatacctgtgacgactctttgtattttgttttaagaataactctaacattggccaggcgcggtggctcacacctgtaatcccagcactttgggaggccgaggtgggtggatcacaaggtcaggagatcaagaccatcttggctaacacggtgaaacccagtctctactgaaaatacaaaaaattagctgggtatggtagcgggcacctgtagtcccagctattcaggaggctgaggcaggagaatggtgtgaacccaggaggtggagcttgcagtgagccgagatcgtgccactgcactccagcctgggtgacagagcgagactccgtctcaacaacaacaacaacaaaaaaaaaaaaaaaaagaagaaaaagaataacatttttagagcatttgctgtatgccaagaactgctgtaaatgctaccatgtcttaattcattcagttctttgccactccatgaaggaggagctactgctattctcacactgggacagaggttcaatacctgcctaaggtcacctggctcatgtgcagagccggaatttgaaccaggcagatgcataggcattcatactcctctagtgagtggtaggaatagcaaaaagtgctgttcagaacacctgctggtaactcaggagagggcaaaagatgttggccctggaaggtaagagctgccaggatctctgagcgtttccctactcaggaatatggagcatcaactcccatccttcctgaaaaatactttattaaaagaaactgtgagcaaacagtaatacaaactatctgcaataaattatttttattgtaatcggtttcctagtgtatttgcttaaacaatgaagattttcttatgttttaggttaaattcatttgtcccagttaaatatccgattagtaaagctttatttctggaacctactttctttgattcactgcactctttcatatattcaggtgaaaaggtattgcatgaatggaaatgtggacatttgaattgatgttttgtatctttcttctgcgcatatcatgactgttttccatctaggtatttttctgtgcccccttattccctgaatctcagtggagcacagaggttgagtgtgggctttggaaacgcaatgacaggattggaacttgcctcttctatttatttgctcactatgtgacctctctctgcctcgatattcttatctgtaaaatgggatattaattatatctaactattgatatcatgaaataatataaagcattttgaacagcatctggcacatggtaagcatacagtgttagctagtctcatccatttctaaataaagggaactgtggttaaagcagtatgatttctataatttcacgtttagaaacaaatatataactatcaaatttgtatatagcattattcacattaccatagatttgaccaccttatatccataagtcattttgatggaaaattccctcccaaaagttttttataacaaaccaagaattgtgaaggtctttgaattactcaaaaatgggggtgttaaagcaatagcagttatgaggctctcagttgttagaaatatacttgcatgagtccttcctagaatcgaaggatacatctcttcctgttgaatatttagtcattgctaaaactgccggtaaaactgtactcagaaccaatcaaatgggaaatggggtatgcgtcacaggattgtcatagtgtgtgtttgctaataacttttagtgggtagggaataaggttaaggagcctgtccttggtgatactatgctgctttcaacgtggcttgttgaaactgcagctgataagcagggcattcgtgcctctgatatggggcattygtgcctctattcttgaatgaggtgcattccagtcaacagcttcaagctgatactgctgaaggaggctgtaacttgtaactaatctgaattacactatatgctttactttatgtgtctatacacagtttcaagcttgcatttcatatataccttgtccttttttgatctagttctttgtttagatatgatgtcctttaagcaaacaaacaaactctgttaataacaactacttctgtggccttaatgtaaaatctattctttctagaattgaattttctggaatttataaacttgtattaggtcgtcttaagtatgaaagaattaccaaatttatagcattcagttctgttgatttttaaaattctgtcacaagtaggctaaagaagatttatgattccttaatatttctttatttttagctgtgtattaaaattttatattatggaaaattatacaaattaagtagtataaagaacttgtaagtaagttgttcagcttaaagctgttaccaaatcacggccactcctgtttcatgcatatttctaccaacttctgcctcccccagggtatcatataccactcataaatgtttcacagtgttatacctgctactcttttttaataacataactggaataccattactccattaaattttttttaatatmcttgatatcattaattccaagacacttcttcagtttccctgattgtcttcaaaactttttaaaaagataatttatttgtttgaaataatattgaaatatacatgtcaattggttagtctcatgtctgtttttaaaacagctttgagatataattcacatccaataaatggcacatatttagcatgtacagttttacaagctttgatatatttgtacacttgtgaaactatcaccatgagcaaaatcatgagcatagccatcgccccacaaagtttcctggcgttcctttgtaggccctctctcttgccccatttccccccggcagccaatgatctactttctgtcactacagattagtttgcagttgctataattttatatgaatggaatcatgcagcttgtattcttctttggtctgtgttctttctccgagcatacttactgtgtgatttgtatctgttcattccttttcattgcagagtagtagtctgttatacaggtggaccaccatttatctgtttacctggtggtgatcactgggtggtttccagtttttgctataaagctgctatgaacattttttttttctttgagacagagtctcactctgtcacccaggctggcgtgcagtggtgcaatctcggctcactgcaacctccgcctcccaggttcaagcgattctcttgcctcagcctcccgagtagctgggattacaggcgcccgccactacacccagctaatttttgtatttttagtagagacggggtttcaccatgttggccaggctggtctcgaactcctgaccttgtgattcgccctcctcggcctcccaaagtgctgggattacaggcgtgagccaccgtgcccgtcctgaacattttaatatacaagtgtttatatggatatacactttcatttctcctgggtaaatacctaggagtggaatggttggaccaaatggtatgcgtatatttcactttgtaagaagctgctgaaytcttttccaacatccttgctagaacttgctatgrtcagtttttataactttcagtcattttaataggtacatatctcattatgggtttttgttgtcatcgtttttttttttttctttttttagagacaagatcttgctctgtcacccaggctagagtacagtggtgtgatcatagcttactgtaacttcgaactcctggtctcaaatgatcctcccacctcagcctcctgatgtccagcttattttttactttttgtagagatggggtctcgttttggtacccaggctggtctccaactcttggcctcaagtgctgcctcggcctcctggagtgctgaaattacagatgtgggccaccgtgtctagcttcattgtggttttaatttgcatttccctaatgactaataatgttgagcattttttgtgtggtatttcccatctgtattctttagtaaagctgctttgataaagaaccactgccaccagggacttgattgtttccagggcatttgggtggacagagatgggaaatacacacatacacattataagataaaatatgagttcattcaatatttccaattcgaagttaagatatgggatttttacctagactgcttgtttctccttttcttacatactgaaaattctagttctgagtaacattgtgcttttaatcatttgttgcacataaaacagtcacagcattaccaacattaccttcagtaacacagttactgaaaagttatgtcgaggagggagatgagtaatcaaatttgtatttcaaaatcatttgaaatagttctcttgatggttatatcaccagtttcataaacatttaggttactttgattcattttactttcaaattttagagattgaattttaatttaaatctgttttataattatgtaaaatatttacatgtttccaaagttcagtctgaaaaacatgattttttttttttctttttgagatggagtttcactcttgccgagcctggagtgcagtgatgcaatctcagttcactgcaacctccgcctcccgggttcaaagcgattctcctgcctcagcctcccgagtagctgggattacaggtgcctgccaccatgcccagctaatttttgtatttttaggagagacgggatttcaccatgttggccaggcctgtgtcgatctcctgacctcaggtgatcaactggccttggcctcccaaagtgctgggtttacagacaggagccaccgtgcccagccaaaacatggtattttcaaatagcttttatccctattgttttcctggcttatattccaatttaaaaaaaatgctggccgggtgcggtggctcatgcctgtaatcccagcactgtgggaggccaaagtgggtggattgcttgagcctaggagtttgagaccagcctaggcaacaagtgagaccctcccccacccagtctctacaaaaaatacaaaaattagctgggtatggtggtgcatgcctgtagtcccagctactctggaggctgaagtgagaggatcccttgagcccaggaggtggaggttgcagtgagcagagatcataccaccgcactccagcctgggtgacagagtgagaccctgtctcaaaacaaaacaaaacaaaaaaactatctatctctatcggtgctatgcatatatatttgtgtggctctccaaggtactgtacacccctccttgcttttttctcattcactctggaaggtgctccatagcagtatatacagatagtcctcattccttttttagctgctatactatagttttttcaccaagttcttttctagataggtttgggttatttccattaatttgctgttccaatgtcttagtatcttttaatatttttgccaatatatatttgagatctatattttgatattggtatttttccagcattttattgtgaaaatttcaaaacacagcaaagtttaaagaattttatagcgaacatctatacttaccactacctaaatgctaccatttatatcttatatattcattttacataagtattcattagtccatgttttttgacacatttcataataaattgtagacatctgtacacttccccctaaatagttcaacatgcatatcactaaatagaattaatatttgtttacaattttttcttctgatataaaatgtatatactatgaaatgtataaatcttaagtgtacattcactgttttgacaaatgcatgtacttgtggaatccaaactcctgtcgaatacagaacattaccaatcacgccagaaagttctttcatattccttcatgttatctttgctttgatgttttttctaccatcagcttggtattgtagagtcactgcaaatttgtctattttggatgctctgtggttaggtttctctactgattttgcttatatttttcataacattgatctgtgtatttctataatagaaccttaaattacatcagctcttcagtgaagatacagatttgattccccactccccacctactgttttgttttgttttgttttggagaaagagtcttgttctgtcgcccaggctggagtgcagtggtgccatcttggctcactgcaacctccgcctcccgggttcaagcaattctcctgcttcagcctcccgagtagctgggattacagggattacaggcgtgtgccaccacacccagctaatttttgtatttttagtagagacggggtttcaccatgttggtcaggctggtcttgaacacctgacctcatgatccacctgcctcggcctcccaaagtgctgggattataggtgtgagccaccgcgcccggcctgttttttccccttaaacacttttgagatataattctcgtactatagcactcaaatctctaagtatataggccaggtgtgrtggttcagatctgtaatcccaacactttgggaggcagaggcaggaggatagcttgaggccaggagttcaagaccagcatgggctacatggagagaccccgtctctacaaaatggttgtaaaaattagctgggcctgatggctcgtacctgtagtcccagctactctcaggaagctgaggtgggaggatccttgggctcaggaggttgaaggtatggtgagccatcatcatgccactgtactccagcctggccaacagagtgaaacccagcctgtatcaaacaaataaatgagtaaacgactgaatgcatggatggatggtttggggtatgttacattattaattttttaaaattgcagtaaaaataacataaaaattgccatttttaccattttaatatatataatttaatggcatcagtaacattcatattgtgtgtaaccatcaccaccatccatctctagaactttttttttttttttgagatggaatctcactctgttgtccaggctggagtgcagtggtgcgatctcggctcactgcaacctccacctcccgggttcaagcgattctcctgcctcagcctcctgagtagctgggactacaggcacattccactacacccggctaatttttctggtattttttagtagagacggggtttcaccgtattggccaggctggtctcgaactcctgacctcatgatccgcctgcctcagcctcccaaagtgctaggattacaggcttgagccactgtgcctggccttgtagaactttttcatcacaaacagaaactctatatccatttaacactaactccccatttctcctcagcatgtagtaatctctattttactcgtgtttatgaatttgcctattctaggtgcctcatctaagtggaatcgttcaatgttccttttgcacctggcttattttaactattagcatcaagttttcagcttcattcatgttgtagcatgtgccagtcttcatttctgtttttctttttttgtgtgtatttttgtgatgattttcaaatctacgattttaatccttttaaagtgtacaattcagtggcatttagtacattcagagtgttatgcaaccatcaccatgatctggctccagaaggttgttatcatcccaaaaggaaaccccatgcccattcagcagtcactccctatcctccctccctgcagccctggccaccactgacctgcctcctgtctgtgtgaatctggctcctctgaatatttcatgtaaatggaatcatacacagaagtcttttctgcctggtttatttcacttgcatcattttttcaaggtttgttcatgtcgtaatgtgtattaatactttgtttctttttattgccagataatattccaaaaaatgtgccatatttggtttatccactcattagttaatagacatttaggttgtgtccactttttggctattatgaatagcactgcagtgaacacttgggtttaagttttcatgtggatgtgtgttttcatttctcttgggtataaacccaggagtgaaatttccgggtcagaggctaactcagcttagatttttgaggaaccgccagactgctttccaaagaggctacaccatttcacattcccactggcagtgtatgtgggttccagtttctccacatcctccccaacgcttgtcaaatgtcgttttggttctaaccatcccactgggtgtggactggtgcagctctgtggttttgacttgtctttctctaatagctaatgatgtgcaacatcttactgcctatttgtatatcttctctggaaaaatgttcactcagatccttgccttttttggggggagggtggtcatttgtctcaactaaagaggacttgtatctagaattcataaagcattcttttttttttttttaaagagacagtgtctcattctgttgcccaaggtggaacacagtggccattcacacgtgtgatcatagctcactgcagcctcagatgcctggcctcaagcgatcctcccacctcagccccctgagtagctaggactatcggcatgagccaccacgcttggctgttcataaagaattctttatgtattctagatacaagtcccttgtgagatatattatttgtaaatattttatcccattttgtggactgtctttttactttcttgatggtgtcctttgtagtataaaagtatctgatgatgttcaatgtatgtacttttgttgcttgtttttttggtgtcatgtggaagaaaccattgcccagtccagggttaagaaagtttctgcctakgttttctgctaagagttttatattttagctcttgtatttatggtgtgaggtaggtctaacttcattctttcttttggtgtgtgtggatatccagttgyccaagcaccrtttgttgaaaatacttttcattctccattgaattgtctttggcaccayggttggaaaaaaaaaatcagttgaccgtaaatgtgagggtttatttctggactctgaattctttgctctcaatctatatttctgtcttttgttttctttttaaaactcattaaagaggatatttgcaaaagtatgcattcatgagccactgctttaaaacttgtttatggtttcctgtattttatttcaacccattgtccataattacctcattttgtctgtcatgctgtctggaagggagtgccagtggtgaagtgtgatgttaatgtcatcaggatggtgatgttcccatttttcaaagattgatttgaacacagataggaagtatcttctgttggcagtgatgacataaaatgttgaaaatgaaatatggaagcttgtgagtcaaagatttccttaccttatttgcatttgaaatgcagtaccacaaaaatatgttgaattaatggttataactttttctttataaagtagacattttagtaccatcaaaaagtattctttatgattatatatctctttatagagttcctgagttggaggtagaagaagaaacccaagttcaagagatgactttagatgagtggaaaaatcttcaagaacagaccagaccaaagcctgagtttaacatccggaaaccagaatccactgttccttccaaagccgtggtgattcacaagtcaaaatacagagatgatgtaagcattgcatttcgtatgtagaggtaatctttacttttaccttactggaagtgaaatgtacctttccacttctgtcttgaaaatggaacattagtagttggcagtctttgtttctaatcagagatgatgcatgcctaattttactgtattgttcattaagaaaaggaattgaaacttgaggtattgacagatgcacagagcagttagagtgacagtgcatcttctgctcaccctgggactatgcgggkactgtacacatactgtgtattaactgtatttcatttttctcaagggagagttacagattgtgtcttgtacaattcagagttaatcaaaggagaactacactctgtgtyccctgagtaggttactttcaactctgwttcttgataagagcatttcactgagtagttgatgacttttttttttttttgagatggagtttcgctcttgttgcccaggctggagtgcagtggcgcgatcttggctcaccgcaacctccgcctcccgggttcaagcgattctcgtgcctcagcctcccaagtagctgggattacaggcatgcgccaccaccccggctaattttgtatttttagtagagacggggcttttccatgttggtcaggctggtcttgaactcccgacctcaggtgatccaccagcctcagccttctaaagtgctgggattacaggcgtgagccactgcacctggccgagtagttgatgactttttaaactgtggttgaggttccatgcacttctgacgcctttcccatgttggttcagcagctttgcgccccctgcctaactgcagacgtggcgggagatgagtccccgaacgcttggctgctcggtcaggcactgccacagcggccagcgtgctgcaggggttgctcagggagctcctccgtgttgtgaggccttattgctcacggcttacgtccagctcttctcagaagcttcagttttgcagggagaggtttcggggaaacatctagcagcatatgttgatagggatgccatggggtcatcaagtccccgacttgttactgaacttaaggctaggtccactgaagcattcccattatgggatttagaatctgtatcattccatctacagcttgataccagtcactatttcgaggtgggagtgagcaggtagcaggttcttcctctctgtggggtattagttattgattttcatgtggaatctcaggaatgttatgctattgtagagttgtcatttacactttggttagtttcattttctgagtgagtactttgattaggtgtcatttaagatacagggttcttgggaggccaaggcaggtggatcacctgaggtcaggagttcgagaccagcctagccaacatagtgaaaccctgtctctactaaaaatacaaaaactagccgggcggttggcgggtgcctgtagtcccagctactcgggaggctgaggcaggagaatcgcttgaacccgggaagcagaggttgcagcaagccgagatcacgccattgcactccagcctgggcaacaaagtgagacttcgtctccaaacaaaacaaaaaaaaagatacaggattctctcccatcctcttgttttggtcagtccaagctgtaggaggccttactgagttttgagctgttccacaagaaatggctttttgtagacataggcggccggagctttatttccctggcaatctctgggaggtgttttctaactccattagcaagctgggttggttcttaacctgtccacttcctttgttcttttttgttctaggcattgtaaataaaaatttctctaaaacaaatgtgctgtcaggattgaaatatgcagctgacatgttaggtaaaaatagaagctgctctttcttaatccacaccagatttgtcctcccgggctccagaggtctcccagaatatttgaagcaagtgggttagctgagtcatcaagcctggtctcagtgaagcacacatcttggtccttgttaatcttggaggattgaagattttagctaggaattgttcttaaagcaacacaagccagatcttgggttcatcagtttactttgttctggacacctgaagaggcagaagcactagaatacctagcaaagttcagacctagtaacaacctcgcgtaaggcactgggcggtgaaagcacttgggccagggccagctggagctgcaagtggagcccaagccttagactgtgtccactccctgctccactgccccgaggcccttcctgccccttcctgcagtgggaggcgactcagagcagggaccccagggagaccttaccagcgcttccctgctgagtgccaaacaaggcaagggttgagtattttgcctgttactattttttgtgtgtatctttttacagaatgccagtgctcctggactgtttttcttcacctttttagcattaagcatccaactacctaaagcctctgctttattttaacctgagacctcaaaggggacacaaatgttaaacatgaaggctgtcatgagcatatggcctaaaggtgttgatatgctcgtggaaactttgctccatttcctggttgtaggaatgtttaatgttgtagcactttggagattctcatctgaaatcactgacatatcttcctttctgtaggtttttactttacttaaagtggggtttttgtgtgtgtgtgtgtgtgatacccattattatgagttgaagccaaatcaaatttggatcagatttaattaatttatttaatatagctgtcacaagagatagaattttaatgaaagcagttcttaaaaagcagcttgacttctttgtgcagtgttggtagaacactcaggtaaccatactcttgtttttataaagtttctctatattttgagtcagaattgtttattataaatcatgtgatttttagcacatggtattataatcagcacccatgctgaaaggaatttctctgttaagttctgttctgggaaggggatatttccttatttatcaaagcatttgtgaacagataagacagaaaataagcagaaatgaaaacttttttatctcagcaaaatacacttagatataaaacatgtatattgtttgctattattagtcatgccaaatcttatatcttaacctgctcagctgatagaaatttggtcccacttgaaatcataataagttcaaagatgtttggattaagattgtaattgcaagaatgtgggactctagaacatacagaactcactgtcttagaatcagaacagcagtgctgtcttcctttgtccagctctgcagcccagggccagagacaaatccagagaatggctctgactagcccctgatggtgttttagctcctgtgtagcacactgcagccactaagccagatgagtgtggggatggctgtggacttgtgcgtgtttgatgctgtaattgtgtttcagatggtaaaagatgactatgaggacgattcccatgttttccggaaacccgccaatgacatcacatcccagctggagattaattttggtaacctycctcgtcctgggcgtggagcyagaggaggcacccggggaggccggggaaggatcaggagggcagagaactatggacccagagcagaagtggtggtaggtgtctgtattgacggtttggcgaaagaagttaataaggacagtgccctgggcccaggatggtctaatttcagagggtcatgagtttctgcagtcacttctttctgtagctagtgtgggactgatgttggggcatttggacggtgttgtagcatcatggacatcttgcctagagaccgttctgtagccctggcttccagggtctgctgtgaaggcactcccgggatcagagagaaactcactgtcacccgcattagacaagatccccaggcttgggattgaactggagcacctgacgttttgcttactgtggcctgattgtgtgccttgggctcaggtgatgctgtcagagtggacagaatcctccctaagatctcaagccctttgtgaggggaccttcctcaacccctccccggctcacctgcctcacaccgtcctcagccaaggctgcctgattctagctctcaacacagcacgctccttacccctggcctctgcctgctggcctccattcatccttccagcctcacttcctcacaggtttctttgatcacatctcctagaccgatcaaggtctcggagcaaaggagtttcttttcattgaagcctgatctccgtgtgcggctgtattctcactggtgtggctatcggtcagcggctgcttttgctcattaccggtttacgcagtgccacgcagtgcctggcatgtagtaggtgcttcctaatgtggtatggacacttattcattggaaatcagccccgaggccccatggcacagaccccttctctgtggctggtcttggcaatgctcctcctgctgcccggttccctcgctctagggagcagcccctggaagcagtgtctatggtttgtttttgcttaagcaggagcaaaaacacaattttttgggcggggggtgtaggggtatatttggggccaggttggaaatagggtctattctgcgataggaaacacaccctcactcctttcctatagcggagctctgtcccctgcagcactccagggagtgtgttgggaaaccactctgagatccagtgccacccacctcttcactggcatctgtccccacctccacaacctgtgcatccctccacctcagaaccgcccttagggcccgcccccgcccccatcaggtcacactgtttcccaatccaagtccttgttccctttgctcatccattgaggttcatcccagggagaaccttctcttcccacaaaaccttgcctgaccttggtgtccactgtgccaccaaattgcactggatggccctcctgtggcccctccttcccaggacgtgttagtgaagctcctgattcgatggtcagtttctccagcaccgtgagctccccgaggataggcactgtctgtgctcctccagtgcccggcacgcagtaaccattctatttactcgatgaaggacgtgcccatgcagaacccccagtaagagcttgcaggacgtaggaagggaggcagctcctttttcgaggaggctggaggcctgtgtgggagggggagctgtactttcctgggttagcagtgacctgtgactctccccttcccactgtgggtcctgcctctaatgcaggcccctcagcgttggtgccaggcccttgttatcccactgggatatcgggaatggatgaaggggcagtggatttcaaagtatttctttttttctttagatgcaagatgttgcccccaacccagatgacccggaagatttccctgcgctgtcttgaaagagccctgtttcccagcaccgcggagctgcactgcacacctgtggggagacttttcyagctgggccaagggagtcagactctaagaacaatagatgttgcttttcccgtgtcatgtaaatttgttgcacttttttgggctgrgctgttagaggggcttctccagaggctcgagagcaggccatttcccaagaagatgaagaatggtgactgtgtttttattgaaggaatttcaaatgaagaataatgtttaaaatgtgtatatagagatagtatagactcctccgcggaagcatggagggaaaggaggttgtaaaatagactccatggagactcttaggaagcagtagattcccgggggctgtgcctttagcgttagaggaaacacatagagctggaactgttaatggaaagcagtcacagctgagttttcggagaccaagaaattaaaatacaattgcacttactgtttacttgtaaatgttatcttctctcctggaatattttgagttctggttttcacttaaccaatcatttaaaaatcgctattgtgtagccactggccaccactstgtgacacagaatcagagaaagcgttgatttttaatggtgatttaaactacctcgtggtttctgtgtgtgtgcacacacacatctagtgtttgggtggtttttaggaagaatattaagtatgtgacttcaaaaaccatgttatttaacctgccaatyaaatggaaagggatcatggcaaaagcaaataccgcatccttttcttccgcagaactagagtcagagttcggcagctgcgtacaaaggcctctgccctcggcttgagcaaaagttgtaaataactagtatttattaagcacttataagcagtttttctcacttagtcctggctccagttctagagttcctctttattgcttttggtgaaagtttggggttgggggtacacctcagaggttcagtaattcacctggagtcccaccctgaacagagctggacccagagccacacacgcccgggaacacacactgtgctggggaggaagtgggcctaggagggcctgcaggtccaggcagctgtagagctgctagaagctggggtgttgctctccccgctttctcatagacacagaggtactgtctgcctgttgtcacacagttcatatgctcgcttgagatggaatctgaaccttggtcccaggatctgtgctttttcccactttgccacactgtctaaggtggctttgaactggaacccaagtgcaaataaaggttggtattcgctcctgactttgtgtagagaaaacagtcctttggttactccaggccacagcagtcggtcatgattttgttgaataatcaaagttgaatccatacacgttagggtcagttaaggatgtttgctttgggtgatagcctacttttggtctcttatttattatctgagtactaaggtttatcaactgagtgttttcttccctttcctggaaaaggcaatggatgcaagtgccctgatttctgaaatctgaacctagccggtacaacatcagggctgtgtcatgagtcagtggctttgaagctgtcacactgtcattttgcctaactgcggctttgaagattagccagagagccctttgaagaaactttcctttagtgttgtgaataatacttgaaaagcccacagcacttggtttaatgttgcagttgcaaaaacactgacagttcctatcccatagagctgttgagtcatgtggttgaagacagttttggggaacccggtgcacgttctgaacctgtaatgggctatgtttgcttaccagggctagctctcgctgacttggtcgtgtgcctggatgtaggcattttgtttgcaccctttctggatcgtgccaggttgtacatagccccaagtgccccagagaagccagggaggacagaagcgaagggcaggggggtgtcaccagcatgccgttgggacagtcagatgcggaggcggcaggaccttttggaccacagtgccccggccggactcctcaggtgcttgtgacgtgggtgtggacatgtcctgaggcagggcaccctgggcaccacgtttctggctggcgacttagactcaagcagattaaccccatgaaagacgccgatgagggctgtcgtccccaagtctcctgaaaagtggaggtcaagcaagtttgagctggttatagccaagcccaggctggactggatcatgtctgaatcaggagttgactgctaggcctcaggggtgtctgagttgtgccaccagggcggctcctgaagactcagctcagggtgaggtcctggggctgctgcgcacagcctgtcaccaggtggggaaagctgccctgcagtaactgggctggggggccagatcctctagagataggggtgcttggctgggtgcggtggctgacacctgtaatcccagcactttgggaggccaaggcaggcagatcacttgaggtcaggagttcgagaccagcctggccaacatggtgaaaccctgtctctactaaaaatacagaaattagccgggcgtggtggcagacgcctataatcccagctactcaggaggctgaggcaggagagtcgcttgaacctgggagaaggaggttgcagtgagcctagatcgcgccactgcactccagcctggacaacaagagcaagactctgtctttggaagaaaaaaaaatttttttaaaaagggaggtgctgcccaagagggaggggtcagtacctaacttgggatgaaagcctaagctgcatgtcagaccagcctgggaagaggcaggctggacacactgctgccggctgggaatgcctccgaagtcagagttggatgctttgaacaagacccctctagcctaatgttgctcatgagcctttggcgttttcattccacgcaaggtgggcccctctgagccagccagcctccttccttgtgctggtcagacttcagaccatttccttctgttgatcagcaagtccatgccattccagcacatgggagcttcacgggaaggagactgctgtcctctgaaactgtactgtgcggtgctggcaggtgcttcggagcagctgagcctgcgtctccgaagctgggaaaggcagaacaggagctgcccgtgcctgccctgttctcagcagcagtgggcctgcctgctctctccacatggcggcctccgctgtagacacagaagacagatttgctcattttctttggctgctgctgtctcctctcagccttctgcaaggaccgtggcccatgtgaacagccttccctgaaccctcccgacactcatgcctgcttcagacaacctggggtgggctgcgggcgtgagaggctttggcctggctgtgtcccacagggggcctgtgttgtggatggaggatgaggtgtggaaaagggaatgaggaagaaaaaatgcagggatattttaaagcctttttattatcaaataagatacagataaaagtgcaaaactagactgggcatggtggcccacacctgtaatactttgggaggctgaggtgggaggattgcttgaggccaggagctcaagaccagcctgagcaacacagtaagaccatgtctctacaataaattttaaaattaggtgggtggcacacacctgtagtcatagctacttggtaggctgaggcaggaggatggcttgagcccaggagtttgaggttacagtgaactatgatcatgccactgcactccagcctgggtgacagagaaaaacttcatctcttaaaaaaagtgcagaactgccttgtaaccacgttttcctccaaagcctggccacgtggaccatgctgatcaccacctcatccccgcgctcccaggactcgcgctgcctccaggcgctcccctccacgccagtgctgccttttcaaagaagtctttcagactttaagtccgaaggatgcccctcctcctacccgctttccccctgcacctatggcaaagcctggttactgaaggagcagagcgtttgcttgagagcctgggagccctgtcttgtcgtgccttgtcattttacagtcaggcaaggacgctgtctttcttgctacctggctactattagggaaggtagaaactgaaaccagattcagtccctgagccccacatcctttctacacactcctgaaatttccagtgaaaggactagtcccttgggcaaagctgttaggagaggggacaggaaaagggatgcctgtacctcaggcaggggatgaaaggagacatggagtgtttgcctctgtgctcagccactctgagccatgtggcgatggccatggtgcctagcagggtactgcacactgcagcagtgcagagggcccacgctcaggtattctccatgtaaaccggatgggactaaaacttggctccctaggcctaaaggcctagcggctcctgcctgctttgcccagcccagcttttctgcacatctcctgttgctcctggaaagctctctgcctggccacaaagtttccttggactctagatgacaggaatttcccaaaccagattgcaaaggctctcacaccccccacagctacgccttgggccaatcagtcctctgtggggaaaatcagggaaccactgccatctgagcactcttttctttctttctttcttcctttcctttcctttctttcccttccttttcttcctcccctcccctcccgtcccctcccccctcccgtcccctcccgtcctgtccagtctcgtcccgtcccatcccgtctcccctcccctcccctcccctttcttttttgtcggagtctcgctctgtcgcccaggctgcagtgcagtggcgcgatctcggctcactgcaagctctgtctcccgggttcatgccattctcctgcctcagcctcccaagtagctgggactacaggtacctgccaccacgcccggctaattttttgtatttttagtagagacggggtttcaccgtgttagccaggatgggctcgatctcctgacctcatgatccacctgcctcagcctcccaaagtgctgggattacaggcgtgagccaccgcgcctggcctgaacactttctttacaaaactgtgcccaatcccagagggctgaattacataactttgggagctcaaagccatttgtaaggtaaggagtgcctgccatgtggcatcaacttgtacataaacccacaggaggcttctgagagtctcaaatgttctcagacactgaggcagggtaagacatttctcaagaaccaccaccctgcaaagggactgagggcgccttcagcaaggctgccctttctgggcacccatgtgtgctgcccccccccgccccccgcccctgcccaggaacttggctcacattgacttcagtgtgcctggcactccctggagttgtgcgatgaacaacctgcacaactgtactggcggcccacatggatactggccacgggtcttgcgtcagagcaacagtgaggaaaacgtttcaagtatctgagacaagttctaagcaaactgaccacaacttgcatgttttgctggtgagaggatagagctggagccagcggtgatgctggggaagttttcaggaagagggaaggtggatagaaagacagcaggagaaatgggaacgccgtgtggcctatgagggacatgcttggggaactgggttgctgtgaccaaggtagaaagatgccctgggaatttttactgaggctccccggcaggcccaggcagggtgaggctgcgtgggtgttgctgattgatgaatagaccctgccatcactgcatatctccgggggtgccttccacacggcatctgtacaaacagcacacctggggtgtgtggccacagccagcaagtcactaagttgacccatcgatgcagccttcaaaaatttggtgcgaacttttctggggagatggaggggcctcagcttccatcagatcatcgcacaggggctcctagcctaagaaagtgtcagcagcactgccctgctgcgcctggaatgggcctcctaccatcccagggtgggtgtcagcccggccattcccaacccagtcaggccgaggcccacctaaaggaaggccctgggctgatggctcaatacccagtggaagaatgaggcagacgcacctgctgagaggcttcaattgcacctggagagaacttgcagtgggcaacgggcgtgtccaggagagaccttccccgcaggtctagtccttgtggatcccgagccagatcagaagccggtctagaaaggtgacagcctgggacagccaaccatcgctggaaaagggaggagatggacagcgctgtacttaccaccaccaccaccaccacagggcctgtctcagggcttgagtttgtgtggacggcaaggactagcttcctgggccgctaactctcaaccgcaaggcaaacttgggttggggcccagaacggccgtcagccgttaccctccagcctggccagtgagtgctgagtggacactccgcggctacttaaggacacgccaaccgcggtcctgccggggcgctccgtgcgtctccctccggctgggtcccggctgaccccgcaatccaggcgcaggcaagggagaccccgctggctccaccgcccaggccaccctgaagtccccgctggaggaggtgcagcggacccgctcccggggagcccgtcccgcgccctccctccgagaagccccttcctccagctccttcctctgcccgccggcccgagagcaccgaggcggcttctctgtcctgtgtactgcccaggacaagcggcattggaagcgagtgagccgttcccagctgggggcagcaacagcccggggccagggaaacgcatgggggcctggaccgtccggtggcaccgagtaggcgggtgccaggacgccagacacgctgcattccccggagtcccacgccagggagaacggccccgcctgaaaagacgtcgtttaacacagagaaacacacccagggccaggagaaaccattgtcctccccgagtcccacaacgcacaaagcacacggtggccctcccacgcggagtcgtctacccctttagaaacagacttggcccattagagcctccgcggccaggccggggcctccttacctggggatttaggtgtggacccagcacgcgtcgtccagaagcgtgtcaaagccatgcagacttgctgccaaagagtcaggcggggttagaggcggggaggcaggggcggggaggcagaggcgggaggccccccactcccac

SEQ ID NO: 95559 - DNA, 68058 bp, Homo sapiens
cccatttcctgccccagcagaggcactttcttttccttgtcctcttgcctactggggaactccttccatccctggttcctcccccagcttctgcgaggcccctcctctgagcccccacacctcatcaaaccctcaacaccgtctggtgttttccttggtgcctcttcaagatgctgtgagctccttgggggcaggtggtgcctgtgtacctcttttttttttcttttttttttttttgagacggagtctcgctctgtcacccaggctggaatgcagtggcgtgatctcggctcactgcaagctccacctcccgggttcatgccattctcctgcctcagtctcctgagtagctggtactacaggggcccgccactgcacccggctaattttttctttttttctttttttttttttgagacggagtctcgctctgtctcccaggctggagtgcagtggcacaatctccgctcactgcaaactccgcctcccgggttcatgccattctcctgcctcaacctcccgagtagctgggaccacaagcacccgccaccacgcccagataattttttgtgtttttagtagagacggggtttcaccatgttagccaggatggtctcgatctcctgacctcatgatctgcctgcctcggcctcccaaagtgctaggattacaggcgtgagccaccacgcctgggcttttttttttttttttttttgtatttttagtagagatgggctttccccgtgttctcaatctcctgacctcgtgatccacctgcctcggcctcccaaggtgctgggattacaggcgtgagccaccgcgcctggccctgtgtatctgtttttctggacctgggcccaaggcctaataggtgagtgcccaggactccatgctgactggaggaaggaatagcatgtggtcaatgtgagcagaagggcctggtagtccaggagaaggaagaagccacttcttttcaaaaaatttattgccaggcatggcggctcacgcctgtaatcccagcactttgggaggccgaaatgggcggatcaggaggtcggaagttcgagatcagcctgaccaacatggtgaaaccccgtctctactaaaaatgcaaaaattagctgggcatagaggtgtgcacatgtaatcccagctactcgggaggctggggcaggaaaatcgctcgaacccaggaggcggaggttgcagtgagccgagattgcgccactgcactccagcctgggcgacagggcaagactccgtctcaaaaaaaaaaaaaaaaaaatttattactggccgggtgtggtggctcacgcctataatcccagcactttgggaggccaagtcgggcagatcacgagctcaggagatcgagagcatcctgcctaacacagtgaaaccccatctctactgaaaataccaaaaaaaaaaaaaaaattagccaggcgtggtggcgggctcccgtagtcccagccactcaggaggctgaggcrggagaatggcgtgaacccgggaggcggaggttgcagtgagccgagatcgcgccacagcactccagcctgggcgaagagcgagactccgtctcaaaaaaaaaaaattaatactttttttttttttttgagacggactctcactctgtcacccaggttggagtgcaatggtgtgatctcggctcactgcaacctccccctcccgggttcgagcgattctcccgcctcagcctcccaagtagctgggactataggcaccctccaccacacccagctaatttttgtatttttagtagagacggcatttcactatgttggccaggctggtctcgaactcctgaccttgtgatccgcctgcctcagcttcccaaagtgctgggattacaggtgtgagccactgcacctggactatttatttttgtagatatggtagtctttctatgttgcccaggccggtcttgaactccgggcctcaagtaattctcccgcttcagcctcctaaagtgctgggattataggtgtgagactgtacgcagccaaaaaagtctacttctttttcttttctttctttcttttttttttttttttgagacatggtctcactctttcacacaggcttgagtgcagtggcacgatcacggctcactgtagtgtcactctcccgggcccaagtgatcctctcacttcagcctcccaagtagctagaattacttggccatcacacctggctaattctttttttattttttgttgagacggggtctccctatgttgcccaggatggtctcaaactctttggctcaagcaatcctcctgccttggcctccccaagtgctaggattacaggcatgagtcaccacaaggttacttctgatgggaggcttgggcagatggcacagaaaggataggtctgtatgaacaaggtttggctgagtggaggggatcgggtatgactagaagccaggcctgctagagggagcaatgaaggttttagagcaggagagggaccccaaaggccaggcagcccttccactgggactgggtacatttcctgagtgcttgtttagtaaaagcactttgtagctcagcggcttgactccccacctgcaaagtgcaagggagtcatcttgcaggcagcggtgaggatgtaagaagatgccatggcaaaggctagtccttgacattgagcctctgatgatcccactctgtattctcagcttagcacatccgggtcaaaggtatgaactgtgcttcctcaactggcttggaatttctcagcgtaagcgtccccttcctccgtaattctccacagaggaaagcagttcccaatacagctatgttttttatttgtcctgggcccagtaagggcaggttctgtgctcacagtagaccccagagtcagtcccagacttctaagtcccaccatgaccctagagatctgatggggtccctcatgcatacgctgaatgtgtattgaacactcagtgtactggccttgggggaggtaaaaggcaggcagaatcgctgatcacatgaggcttgtcatctagtttctccctcctttaccgtgtcaagcctgggctcccaagatgagtgtgaggccagccttattccaggatatatatatctatatatatatatttttgagactgagtcttgctgtgttacccaggctggagtgctgtggagctatctccgctcactgcaagctccgcctcccgggttcacgccattctcctgcctcagcctcccgagtagctgggaatacaggcgcccgccaccacgcccggctaattttttgtatttttagtagagatggggtttcaccgtgttagccaggatggtctcaatctcctgacctcgtgatccacccacctcggcttcccaaagtgctgggattacaggtgtgaaccaccacacccggccccaggatatattatttccagttccctttccttctctcctttcaggagaaacccactgttcttagaaatggagaaaaatgtccaggcccagtgactcacacctataatcccagcactttgggaggccaaggtgggtggatcacttgaggtcaggagttcaagaccatcctggccaaaaatgctaaaaccctgtctctactaaaaatacaaaaattagctgggcatggtggcaggtgcctgtaatctatgctactcaggaggctgaggcaggagaatcacttgaacccgggaggcagaggttacagtgagctgagatcatgccattttgcactccaccctgggtgacagagtgaaactgtgtctcaaaaaaaaaaaaaaaaaaaaaaaaaaaaaagagaaaaactccttaagaaggtctgagtatattctgaagctatgttcttctctctgcattgctacctgaggtccaaaccactgtcacctctttgcctgaatgattgcaaccggtttccaagtggcccctgctccccttcttatcctcttacccacctccattccccattttccaatcagagtactcctttttttttttttttttttaagatggagtctcactctgtcgcccaggctggagtgcagtggcgcggacttggctcactgcaacctctgcctcccaggttcaagcgattctcctgcctcagcatccagagtagctgggattacgttcgcccaccaccacacctggctaatttttgtatttttagtagagacggagtttcaccatgttggtcagggtggtctcaaactcctgacctcaagtgatccacccccctcagcctcccaaagtgctgggattacaggcatcagccactgtgccaagccccaaagtactctttaaaacatgcgtctcagcccaggtgtggtggctcatgcctgtaatcccaccactttgggaggttgcggcgggaggactgcttgagctcaggagtttgagaccagcctgggcaagacagtgagacttcatttctacaaaaaataaaaaaaaacttaggagggtgtggtggaacgtgcctgtagtcccagttaattgggaggcgaagcaggaggatcccttgagcctaggaggtcgaggcggcagtgagctgttatcgtgccactgtactccagcctgggtgacagatcaagactctgtctcaaaaaaaaaaaaaatcatctgaccatggagtcaatactcatatctatcaaagacctctcacagcacatggaatagaaaccaactcctcccctttctacaagaccctccatggtctgtcccctgcctccctcccaccctataatccttttactccattctggacactgagacagcctcatggtcttcgccagtgctgcttcctctgcttgaaacattctcctccagtcctcccagctgttccttcccattttccaggtcccagcattggctttggagccagcagcccacctgtgacaggagcctggctctgctcctagctggccgtgtgaccttgggcaagtcactggcttcttctgtgcttctgtttattgtgaaatgaggatgttaatgctaacgtatcccagaggatggtttcaagggttaaagaaaataaagcactagagagaggtctggcacttagtagggccatttcctcaatttggcttccttgacctctcaaagtatgtccccacagtcactttcctatcacccagttttcttcacagagcttggcagtgtgaagtaaccttggttattcaactttttttttttcccccaagacggagtcttcctctgtcacccaggctggagtgtagtggcaagatctcggctcactgcaacctctgcctcccgggttcaagcgattctcctgcctcagcctcctgagtagcagagattacaggcgccygccaccacgcctggctaattttttgtatttttagtagagaccgagtttcaccacgttggccaggctggtctcgaactcgtgaccgcgtgatccacccgcctcggtctcccaaagtgctgggattacaggcgtgagcccccgcgcctggtcaactattttatgcaatcagtatttattatgctcctactatgtgccaggcactggttgtaactgccatctgattggacgatccgtaaacgctgaggcccagtctgtgcggttcacttgcgttcctccacgcgccccccagcacagtgggaagcacacagtaggtgctccgctctgctcctgtgccccgccccgcggcccctcccccgctccaggaagtgcgggggctccagccgcccggccggccgcgatgcattctggggaaggagcagcaccaaatccaagatggcggccagcaggaggctgatgaaggtaaaagccattctctggcagcggccgggcgtggggcggcgtcctaggctccggatccccgaggcaggcggcggcttctcagggcgctgccgtctggcttcctgccctacacggcctcgtcggttccctgggccgcgcgcaggctcaaggtgctaacggggctggcctaggccgcagcctgggcgggagcgcaaggccgcgctgggagccgctgtcggcccctcagcccggcccggggcgttcacgccactctccgcccggagcttggccgcgtccccctgtcgcggaggccgcggtccgatcygagggcgtcgttaatgtgagagcccggttgggaggctccaaaccgggcgccttcggggaaggcccgagcgccggagcccctgcccggagccsgcgccgcggaaccgccccgccctgggccgcagcgcgccgggcttgcagctccgcttggcccggccgcagctcgggagtctgggaggttcgggctaggaaagagagaaggaggccaggcggccaaagttaggtcagtttgttggtgggtcgtttggaattgcgctgggtcctagcaaactgtcgccttgtgactgcagagtcacacagcgggtaagttccaactccaggaaggcctgaggtcggccccgatcgcggcgcggttctgcttccctctcctccactcagtcatcccgatctcccctccctgataaagtgccatttttggggggataacggttgatttcagtcgttcgaatcaaaacgggccaaagtttataataataatttggtactttggatcttgaatgcagcagggtgctttctcgctaattggcaccttttggtgagkaacacatgctaaattggcttagtacttttgccagtggatttgccaaggtcctctgtagcccaccccgccagcatctgtgagtcggcggctgggtagtgctgccggcctgcaacgggccggaaattaaaaaaaggcccaggagccagtttcctgaggggagataaagagctggggttcgttctaggcggagcagtgcttggtagagctagacattgaacttggagccacagtctctgagcmttccctccgtccctgggaacgtttcctttcttttgttccctaagggctagagaggacattaactttataaaactggagtggaagtgggcacaaaagaacagtcagaggacttcagacctctcctcatctcttaagctagtgacaccaccattcaccagataagrggtcggttaatggctttctttcctaccctactcccaggtgcagtcgtccattaacccttgtggatttaaatttagaaagatttctggagtgcaggccgggcgcgatggctcacgcctgtaatcccagcactcctgggaggccgaggcgggcggatcacttgaggtcaggagttcaagaccagcctggccaacatggtgaaaccctgtctctactaaaaatataaaaattagctgggcgtggttgcatttgcctgtaatctcagctacccgggaggctgaggtggaagagtcgcttgaacccggcaggtggaggttgcagtgagccaagtttgcaccactgcactccagccagggcgacagagtgagactccatgtcaaaaaaaaaaaaaaaaaaaagatttctggagtgcrtgccttgctttctaatgttactgaaattactctgaatctatatcctcatctctcaggtgccctcccaagtgctctcctccccagactacccctgacggacaccagagttcttttaaagcagataactcaattctttcactcctgttaaaaacctctatggtgttattgtcctcagcagttaatcctaacctcttacttggcatgcaggacctttctgagactggctgaaagcaatcccttgagcctcacctcctgccctttggtttcccacagttcttgcacctaatcacagtagctactatttttccagcttttacttcgtgctttatatgcatgatcatgtttaatccttcctgtgaagtagacattgtgatttccattttgtcgatgagaaaagattctttggcttgcccagggttacctagctagggagagtgagttgtgatcgaattcggttctttctccaaagcaaagtctcctgctcttacttgctgtctgatgtccctttgcacgtgttgtttgctctacccaagaaaagctgccttctcctcacttctcccttccagagaagtcccaggttcaactccagtgccaactactctgtgagcccgtgctcccacatcccccttcagaatgtgttgtttcctcctttgtgtgaccacagckctttctttatatttctctttgagcacttgtcacaatctctttgtgttacagacttgtctttcctgtactgggttctgagatcccgaagggcagggatcttgacctaattcatcctggtagccccctagcctatcccagttgacccagtttggaatctccaggctctcaggggtctaagaggggacttattatggttttaaaattattactctgtttctaaaaaaaaacagaccttggaaaaaaattgtaacattaactgagtatttattaagtattaggttatttacgtaagtcatcttttcaacactcaaagttagtgtattgtcatttgtattttttataaatgaggacattgtgaggttaagtaggttaagggagttacctaaggtagaattgtggaacgtggtggggagagagaagacgctgactcttcctggctccaggatccaaattccatgcctcttgtcaggctgtctttcttactcaaaggctgcatggagcggtgtgttgtttcttaagttgaggatggaaaggctttcagttcactaggggaacaccagttatgtaatgctgatcattggctgtgagaatcaatgtttaagactgttttttttttcttttaaaggaagaaraattattgatacaagttgataaacagtcttttcagtacatagggtggtaataaagtgattttcgttggygaaaagttggggcttagtgcatggaacagtgccttaggcatagcaatctagcaaatgttgaatgatcaaattaattacatcttaaagaactttagatttctgttaaaaatgttttctaggacattccacagcaaagatttctttgtaacaatggactgtctgcagatagtgtaaaacacattattaaaagtagagtgatttacatatactacactgagaagttattttaggcaaagtgagtatgataaagtcttttatttcaaaagcacttgccaggaggcttaacctcttttagaagcctttttaggaattacagtgttaataaaacattaagtacattttaatttgcaagcagctaatttagcattgttggctacaaccagattgtaaccattgcttcaatcaggatggggaaattgctgcaaaagccaaaagtgaaacctttatgtgtggcttaggcaactgattgccatctgatcatttctttgcagcttcacactgcacacatttcccctaagggccctcctgttgagtagcttcccagaagggcttttctcagaggggaaatctgtggatttagaggggtgtgtgtgtaatgtcttattacttatcatgacataactgttgagttaaggagtttcactcttgttgcccaggcttcagcgcgatggcacgatctctgtgcactacaacctctgcctcccaggttcaagcgattctcctgcctcagcctcccaagtagctgatactataggtgtgcaccaccactccctgctaattttgtattagaaaggaggtttcaccatgtttgccatgctggtctctaactcctaacctcaggtgatctgcccgccgaggcctcccgaagtgctgggattacaggtgtgagccactgcgcccagcctaatgctatttaaaaatgttcactcagaacttcatattgttatattttctcccagttcatagtcatagtaggaggaacctctaaaagttcattccttgggtttcgttgtattaagcagtgaggtagtttgcttttgagtataggtttagattctgaggttgggtgattaaggagatagagcaatgagtatgtcacatgtttcaggaggtgaggggagttttatatgtgatgttatgccagtgtaaatgtcctgaatccactgaggctttgtgaattgagaaaaacgttgcgtctttttttctaaattcatgcattccagtaagttgggactgtttcagcctcccttaatggtattctttgtaaatgtttgggacaggtgatgggaaggagtatactcaattattgcaacatttgggaccttttaaggtatttactagaaaactctgaggcaggccaggcgtggtgrctcacacctgtaatcccagctctttgggaggccgaggtgggcggatcatgaggtcaggagttcgagaccagcctggccaacatagtgaaacccccgtctctactaaaaatccaaaaaattagctgggcgtggtggtgggtgcctgtaatcccagctactcgggaggctgaggcaggagaattgcttgaacccgggaggcagaggttgcggtgagccaagattgtgtcattgcattccagtgcgagactccgtctcaaaaaaaaaaaaaaaaaaaagaaaaccctgagacaaaaactcttgtctcagggtactggggccttttctgatcttgttaaaactctaaattaggagactgttgctttaaaattttattataagaggacacttgaaagtattctcattttattggaacatttattacgtttaagatatttctatattctttgctacagcagtaaatgtgagagccacatttctttgcagcttcacactgcacacacactgcacacaswgtgcacattagagagccacagagacgttcctcctgagccagactccaaccacttccagagttttcttgggaacggcacatagatctgtaggcatctragtcttagctcctcctgtgactctctccctctggccccatgcatctcctcctgtcccaccttagttaatggttcacttgtctactcagttgctcaaggaaaaaacgccagcggagcccttctcggctcttcctcccttgtctagtcacctggcggattctgctgaaytatgccttcagtctctcttctctgcctgtcttctctccatccccactcccactcccaatgccactgccactcccactgcctcagttcaggccatccctgtttgtggtagacacctgcatcgagctccttaatggttcatctaaactccttactggtcagcgcactctctgtcccacactactcctaaccagcagtgcatcagagtagtgtatggtgtggtgtgcagtagagaagtgcacatgagcaggccctgctctcagagattggagcagaatttagtagggtgaggatgaggctgggactctggattacaagtgcacattccttagctttttccttcaaggtcttgtctcaccagccttgtctctccccacttgcccgttgagtcccctaaaaacagcatgctttgcacacacactctggatctcgtgattggcatccctgtctcttctctgtaccagggtaactttttgacctttgagactcagctcaaggggcaattcctctgcccttgaggagctcaacaaaggagaaaaatggcacgtacctggaacaaagaaatcctgggctggccactgtgtgctagatgtctgccacctgaataatggcttgcaggagagggaaagaccccctctgacactgaggaggaggtcgaacttggcctggccctttaagcacgagtagggtttcagcagttgaagaagacggactgggtggccagtgaggttgagtctctctcatccctcaggagggctgtgggcagtgcctatgggaaatgctttgaggagccccagagaccatctgcctactccccagtgctgcttgcgtctgaccttgtgccgtcccgctttgggttttagttaggccagcccctgagatgctttccagaagtgttgaggcattggcttgattttaccccagattggcatgtccagtgcacctggttcctccagagctaggagacctccctctgccaggccagccttggagggtgagctacctctctatagaggggtcactgagggcagtgctgatggatttaaggacaggtggcagagatgccatagcctttaggttgaggggccagatctacatatctcctggatgctacagctatccaggagaagtggcatgccactcactcagaaagggctttgcatgtatctcctgtggccagcttcatcatgcctgttcttgggggacataaataagcctaacctccccaagccccccacccctataagaaagggaggaaggggcttttgctcagagcaaagctgtttagaggaagactacagcatagcagttaaaagctcaggttctggagtttcaatcctgggcctgccatgtcttagctgagtgaccstgggcaagttactttacctctctgtgccttagttacttcgtccrtgtgtgaaggttaaatgagttaatatataccaactgcttagaagagtgcctggcatatagtaagtgtgagctacttgtagatattattgggaataaccaagacatgttccagggcagggaggtgaccagcctgacaggaggggaggatttggaggagtgataggagatggtattgcaaaggtgttttcgggacaggttggggccagtctgcctggacataccctcatcactgagagcccattctcttacctgtggtactctcttattctgtaggktggagaaagagttactgagacagctgtgtgaatgtttgtttaaaaatgttggctgggggccaggcgcggtggctcatgcctgtaatcctagcaccttgggaggccgaggtgggcggatcatgaggtcaggagattgagacaatcctggccaacatggtgaaaacccatctctaccaaaaatacaaaaattaaccaggcctggtggtgcgtgcctgtaatcccagctactagggagggggaggcagaagaattgcttgaacctgagaggcagaggttgcagcgagctgagatcgtgccactgcactccagcctgggtgacagagtgagactctgtctcaaaaaatgttggcttggcgcagtagctcacacctgtaatcccagcactttgggaggctaaggcaggtggatcacttgaggtcaggagttcgagaccagcctggtcaacatggtgaaaccccgtctctactagaatcacaaaaaaattagctgggtgtggtggcatgtgcctgtaatcccagctactcgggaggctgaggcaggagaattgcttgaacccaggaggcagaggttgcagtgagccaagatcatgccactgcactctggcctgggcaacagagtaagactccatctcaaaaaaaaaaaaaaaaaawgaaaaggaaaaagaaaaatgtttacttggctgggcgtggtggctcatatccgaatcccagcactttgagaggtcaaggcgggtggatcacttgaggagaccagcatgggaaacatgacgaaaccccatctctactaaaaaaaaaaaaaaaaaaatacaaaaatcagccgagtgtggtggtgcatgcctgtaatcccagctactctggaggctgaggcaggagaatcgcttgaatccgggaggcggaggttgcagtgagctgagatggtgccactgcgctccagcctgggtgatagagcgagactctcgaaagaaaaaagagaaaagtttacttttcccaacaaagttgaatagctttttttttttttttttttttttttttkggagacggagtctcactctgtcacccaggctggagtgcagtggcaccatctcagctcactgcaacctctgcctcccatgttcaagccattcctcctgcctcagcctcccgagtagctggaactacagatatgcgccaccatacccggctgatttttgtatttttagtagagacggggtttctccatttcccaggctggtctcgaactcctgccctcaggcgatccacccaccttagcctcccaaaggattacaggcgtgagccactgtgcccagcttaaaattgaatagctcttgaactcaaaatttgtctttctaatatctcagaaatttaccttgcatattgtaaacatccagtgtagtgtgacagtcactgtgtccaaagatgagcataggtgctatggaaggctcccacaggtgctgaactggggcaggggtggaggtttgaaagcaactttttttttttttttttttgaggcggagtctcgctctttcacccaggctggagtacaatggtgtgatcttggttcactgcaacctccgcctcccgggttcaagcaattcttctgcctcagcctcctgagtagctgggattacaggcgcacgccaccacgcctggctaatttttgcatttttgtttttttttgttttttttttgagatggaatcttgctctggcgcccatgctggagtgcagtggtgcgatctcggctcactgcaagctccacctcccaggttcacgccattcttctgcctcagcctcccgagtagccaggactacaagtgcccgccaccatgcccagctaatttttttgtatttttagtagagacggggtttcaccatgttagtcaggatggtctcgatctcctgaccttatgatcctcctgcctcggtctcccaaagtgctgggattacaggcgtgagccaccatgcccggcccccaatttttgtatttttagtagagctggggtttcaccatgttggttaggctggtctcaaactcctgaccttgtgatccgcccacctcggcctcccaaaattctaggattacagatgtgagccactgcgcctggccgaaagcaactcttgattgagaagttgaggtctcagatgtaatattcttgcttcttgtcttctctttccttttttttttttttttttttgagacgcagtctcgctctgtcgcccaagctggagtgcagtggcacgatcttggctcactgcaaccttcacctctgggttcaagcaattctccctgcctcagcctcctgagtagctggaattacaggcgtgtgccaccatgcctggctaattttttttttttttttgagatggagtctcgctgtgttgcccaggctggagtgcagtggtacagtcttggctcactgaaagctccgcctcctgggttcacgccattctcctgcttcaccctctcgagtagctgggactacaggcgctcgccactacacccagctaatcttttgtatttttagtagaaacggggtttcaccatgttagccaggatggtctcgatctcctgacttcatgatccacccaccttggcctcccgaagtgctggtattacaggcgtgagccacygtgcctggcctgatttttgcattttttagtagagacggggtttcatggtgttggccaggctggtcgtgaactcctaacctcaggtgatccgcctgcctcagcctcccaaatagctgggattacaggcgtgagctaccgcacccagcccttgtcttctctttcaaccttgaagcagaaagttaagaaagttgcttctggtggctgtgtagtttctccttctgacccttgctgcacacatactctagaattccagagctgtgtgagggatcttggaaagcagacaccagtggcctctgtttacagatgaggaggctgaagtcagtggtggagccaggcccaacatcaaggtcccctgctctctgggccttgctcctgctttttagatggttgcttttggtcttgaggaagggacaagatggagaagaagagggttcatttcagattcggtggctgtttgggttttgtttgttttggtttttaacacttccagggctgtgttgattatagttttctgtatttcaytttcttgtcagattttgtccctactttcctagcataggtaggcagagcggggaacattctcttttgacagcccttatcccagcaggcacatctgcaaccaaagcaggtgctaatgtcaaagggctcatgggctaatgtcagggctcatgtgatgctccatctttctgagaggagaccacctgactcacggtgaggragaggktgtaactcagaggttgaatagcctctgaacccgtctgagatggcttataaaaaagtgtttcacaccagcacgcctctcattaagaacagtcagcggccgggcacggtggctcaggcctgtaatctcagcactttgggaggctgaggtgggaggatcatgaggtcaagagatcgagaccatcctggctaacacagtgaaaccctgtctctactaaaaatacaaaaaaaaattagccgggcgtggtggtgggcgcctgtagtcccagctactcgggaggctgaggcaggagamtggtgtgaacccgggagtcggagcttgtagtgagccgggattgcgccactgcactccagcctgggtgacagagcaagactctgtctcgaaagaaaaaaaaaaaaaagaacagtcagcataagaaaacctaagcttcctgaaggattctccacgagttttacacaggcagttcccgtcgtgcccatttgtcctgtgtcaggctttgtgtggttgagtctgttgtggacagacttgaagaggtcggtgtcccagccctcaaggagctgtcagtctggtaggggggtgctggactctggagtttgtaatggaggtcaggaatgccaggcacacccatgtacagatggacacggaaacaccttccaggaatgaggcccggcagccagaagctggtgtcaaggcctgctgagttggagctttggccatgcttcccccatgcttactgtggaggttgtgggcagtgcgttcctctaagcctctgttgagtgttttctttgtcatgtcctcttagaatgaccacctgagaaggagtgtgctgtaacctctgagaagcactgtgctgtgatagagtaagagttcagatgtagatttctgcctttgactccttagtgttgtgcctttgagcctcagtgccctgatttgtccagcagatgatgagatgacttcataaagttatgatcatagctaagtgtattatttatttatttatttatttatttatttatttatttattttttgagatggagtttcactcttgtcacccaggctggagtgcaatggtgtgatctcggctcactgcaacctctgcctaccaggttcacgcaattctcctgcctcagcctcccgagtagctgggactacaggtgcccgccaccacgcctggctaatttttgtatttttagtagagacgggggtttcaccatgttggccaggatggtctcgaacttctgacctcaggttatccacctgcctcggcctcccaaagtgctgggattacaggcgtgagccaccatgcccagccccaggtgtaattagttatgatgataactaaatgtaagatagctaccatactgctgacctatggaagggatgatgtcttggcatgggtcctgcccccttagctaaatgttagttgaaatgagagaattgcattagaaggccatgaggcttatgtttagattttcagtatattgaattacatttaagtcatgatttagtggycaggcacggtggctcatgcctataatcccagcacttaggaaggctgaggcaggaggatcacttgagcctaggaatttgagaccagtctgcccaacatagtgagaccctgtctctgcaaaaaataaaatgattaactgggcatattggcacatgcctgtagtcgcagcttctcagaaggctgaggtgggaggatcacttgagctctggaggttgagactgcagtgagccgtgatcatgccactgcactccagcgtcggcaacaaagcaagaccctgtctcagggggaaaaaaaaaagtcatgattttagtgtcattgctaacggttgtcttatgcaagcttggaaagtttgcatttctgttacaattatttactttgatagaccagttatactggaatttggtagatttaaggcaggtttatgtaactttcctcagatgtccagctccatctgccaggttttgttttgcctgagcagtaggagcctagaaatattccttgcacaacacaggcacataatgactagctgtgcaggactagggaaaatactgaatatgttcatgtttttgttgatgtaaatattggtcaatactattccagagcaagctaagccctcctgggatcccacagagtaaacaggaaaacctgctctgtccgtttctaatgggagcattaactcactgctttgggtggctgagatagtcaaaaaagagcaatttcagtgcaggttctagtcctgggcatgctctatacaagttctttgacttggacatctctgagccttggctttaccatctgtgaaatggggctaatatgccccacttgcccatctcaggactatgaattgtaaacagtgcagaatggccttataattgaccacttcctctcaagccatggctacccctttcccagcatctctttgttttctgttcttgttggaattactcttttcttttctttcttctttttattttctttgagatagactctcactctgttgcccaggctggagtgcagtggcgcgatctcggcttactgcagcctctgcctcctgagttaaagcagttctcctgccttagcctcccgagtagttgggactacaggcatgtgccaccatgcctggctaagttttttgtatttttagtagagacagggtttcaccatgttgttcaggctggtctcgaactcctgaccttgtgatccccccacctcagcctcccaaaatgcgggattacaggtgtgagccattgtaccggacttaatttttgtatttttagtagagatggagtttcaccatgttggccaggctggcctcgaactcctgacctcatatgatctgccggcctcagcctcccaaagtgccgggattacagacatgagccaccatgcctggcctcttttcttcaagagacaaggtcttgctccgttgcccaggctggagtgcagtggcatgatcataactcattataactcattataacctcgaattcctgggctcaaaggatcgtcctgcctcagcctcttgggtagctgggactacaggtgtgtgccaccatgcccggctaatttttttttttttttttgagatggagtctcaccctgttgcccaggctggagtgcagtggtgcaatcttggcttattgcaacctctgcctcccaggttcaaacaattctcccacctcagccccccaagtagctgaagactataggtgaacactaccatgcacagctaatttttgcattttttggtagagatggggttttgccatgttttccaggctagtctgaaacccctgggctcaagcagtccacctgccttggcttcccaaagtgctgggatttgagccaccatgcctggccattttgttatccttattatttgtagagatgggatcttgctatgttgcctaggctggtcttgaactcctggcctcaagcgatcctcctaccttgacttcccaaaatgctgggattataggtgtgagccactgtgctggccggtgttcacttaaaggaaaaaaaaaccttcaggctgggcacggtggctcacacttgtaatcccagcactttgggaggcctagatgggcagatcacctgaggtcgggagttcgagaccagcctgaccaacatgaataaacccctgactctactgaaaatacaaaattagccgggcatggtggcgggcgcctgtaatcccagctgctcgggagtctgaggcaggagaatcacttgaacctgggaggcgggggttgtggtgagccaagatcacaacattgcactccaacctgggcaacaatagtgtaactgtctcaaaaaaaaaagaaaaaaaaattcagaacaagctgtgcccagtagctcatgcctataatcccaccactttgggaggctgaggcaggtggatcacctgaggtcaggagttccagaccagcctggccaacatggcaaaaccccatgtctactgaaaaaaaaaaacaaaaataattagccaggcatggtggcacctgcctgtagtcccagctactcaggaggctgaggcaggagaatcgcttgaacctgggaggcggaggttgcagcgagccaagatcgcaccactgcactccagtctgggtgacagagtgagacttcatctcaaaaaaaaaaacaaaaaaacaaacaaaaaaaaaaacagttcagaacaacgtctgggtttcggtgcttatagacttgtagtcagagggattttttccatgtgcttagctcagtgggaggttttagtccttttaggagcttgtttctagctgtagaaatgacactgcattcatcaaggctccagttttttccttgccaagaaactgggtggtatgaatgtggtgggtttttttttgttgttgttttttttttttgcgatggagtctcgctctgtcacccaggctggagtgcagtggtgcaatctcggtctactgcaacctctgcctcccaggttcaggctgttctcctacctcagcctcccaagtagctgggattacaggcatgcatcatgactcctggctaatttttgtagttttttgttttttgagmcggagtttcactattgttgcccagcctggagtgcaatggcgcgatctcggctcactgcaacctctgcctcatgggttcaagtaattctcctgcctcagccacccgagtagctgggattacaggcgcttgccaccacgcccagttaatttttgtatttttagtagagacgaggtttcaccatgttggccaggctgctgttgaactcctgacctcaggttccacctgcctcagcctcccaaagtgctgggattacaggcgtgagccaccgtgcccggccctcaatatggtgattcttaagcagagcaggggttgcacatcacagtcatctgggagcactcccctcagaaaggtacccatcttgtactggaggctgatgcaataagcaggtcctagatggcgcctaggcacagtcagctctccttccttctcccctgtacccatctaagcccttcccctgcctctctgcataggggtattaaacagcccccaggggcttggccatgcaccctggctgaaagttctggccctgatcatgagtgccctgagttggtaaacactgcagctaaactggtttcctttctgcttccctaacgcccccactgatttctgccctccatgtctctgcatacacatttcccacacatggacacctgttctctagcagttctgtcttcccccgtctttcaaggcccatctcagagcctgtcttccacaaagctgttccctccactggtgtctgctagactttcctcactgtgacctaaaggttcctagagcagcgtttctcagttcttttaacccaccctcaacagccaagaaaagtggccttaagctttactttcctttagggatactacaggccttttgccatttaacagatataaaatgacacagtggtatggaatatgcttgtttacattgtaccagtgtccttgcattgagacttgctgcccatagtactgctgtgacatctgaagcatccctgactggccccactggttattcttctgcacgtctgttcacctgctcctggcactgacttcagaggagactcaagagggtgtatagtacagtcttgcccagtgcaggtggcttctttctgacagccctggccactggcagccctgtctgccccacccatttgagtatctataatgacatgacgactgctgccccgagtcaggggggcttagaccacgtgaaggtagcattaaagagtttggcactgagtcaaaagctgcctgggatagtgaacacttactggccccaattctttcttctttactcatatagaaggttgaatcctttgcaggtgaactttttaaattttaattttttttttcttctgaggtggagtttcactcgttgcccaggccggagttcaatggmgcgatcttggctcactgcaacctcctgcctcctgggttcaagcgattctcctgcctcagcctcctgagtagctgggattacaggcgtgtgccaccatgctgggctaattttgtatttttagtagagacggggtttctccatgttggtcaggctggtctcgaactcccgacctcaggtgatccgcccgccttggcctcccaaagtgctgggattacaggcatgagccaccgtgtctggcctaaatttttttttttttttttgagacagagtctcgctctgtcacccaggctggagtgcagtggggtgatctcagctcactgcaacctccacctcccgggttcaagcgattcttctgccttagcctcccgagtagctgggactacaggtgtcaccaccacgcctggctaatttttgtatttttagtagagatggggtttcaccatattggccaggctggtgttgaactcctgaccttgtgttctgcctgccttggcctcccaaagtgctggaattacaggcgtgagccaccacacccggcctcggcctaaattttaaattttaagttttattttatttttatttttttgagacaaggtctcactctgtcacccagactggagtgcagtggcatgatcatgggctcaggcaatccttccgcttcattttttaatttttttgtagagatgaggtcttactgtgtggcccaggctggtctccaactcctggcctcaagtgattttcccgcttcggcaacccaaagtgctgggattacaggagcactttgggaggccgaggcgggtggatcccttgaggttaggagttggagaccagcctggccaacatggcaaaaccccatctctactaaaaatacaaaaatgagctgggcatggtggtgcgtgcctgtagccccagctactcaggaggctgaggcataagaagcacttgagcctgggaggcggaggttggagtgagctgagatcacgcctccacactccagcctggagagcgagactccgtctcaaaacaaacaaacaaaaaacaacaaaatgtggaattactggcataagccacttcgtccaaccagcaggtgaactttttaacgtttgaagacagatgtatgtcatcttcacatttctttaggccataggttcctggaccttttgattgttcctggtaggacatggtccttgctgttcttgtcctgagcagcccttatttgatgtggtcttctaaagtatggtgtccagaactggacacagcatttggctctgaatagttcagggtggcctggacgctaaacatggcacaaacgattggtcagctaaaccagtcagtttttcatgctgctgctaaggttcatgccttgtgcttggtgaaaaattaagtgtttggaaccaagtccaggtctttactggatctctaaaatatttcattctgtgacttggggtgtkgttttgctatcmaggatccttagaggtttggtctttaagcctgtattcgttccttccctgatatgtggtacctaactacatctctctcagcccacttcccaccagggtgacttcaggccaccagttctaaagccattcgattctcctcagctcttcttgatccagcctctgtttatccattttgtacagaaacattgtagtggctgttgagagaaaggagcatcccttttagccagggcttggggagctccttagaggaacaggcatttgagagaggctttcaatgatgagcatgttggggatgtggggctggtgataggcaggacagttagggacatccttccagaagacatcctggggaaagacatagaggggggaagtcaccaggctgacttggtaggattctgcacactgctcatttgggttgcaccaagagctttagttggaattactgggttgcaccaaagagttttagctggaaatattggatgggaggattcctacatattttgttgggggaagggtcgtctagtgctgttggatttcttttctagtttttctttttttgagacagggtcttgctctgttgaccaggctggagtgtagtggcaccatcatggctcactgcagcctcaaccttttggactcaactggtcatcccaagtcagcctcctgagtagctgggaccacaggcatacatcaacacacctggctaattttttaatttttttatttttgtagagatagggtcttgctgtattgcccaggctggtcttgagttcctgtgcttaagtgatcctcctgccttgaccacccagtgttgggattacgggtgtgagccaccgcccctggctcctggcctagatttattttatttattttattttgttgagacggagtctcactctgggagtctgcacccaggctggagtgcactggcgtgatctcagctcactgcaacctccacttcccaggttcaagcgattctcctgcctcagcctcccgagtagctgagactatatataggtgcacgccaccatgcccagctaatttttgtatttttagtagagatgaggtttcaccttgttggccgggctggttctcaaactcctgacctcaagtgatccgcccacctcggcctcccaaagtgctgggattacaggcttgagccactgcacccagccttttttttttttttttaaacggagtcttgctctgtcacccaggctcaagtgcagtggtgtgattgcagcttaccacaacctccacctcccggattccagtgattctccaacctcaccctcccaagtagctgggaatacaggagtcaaccaccatgcccggctaatttttgtatttttagtagagacagtgttttaccatgtcggccaggctgctctcaaactcctgtcctcaagtgatccacccgcctcagcctcccagagtgttgaagcgttggaattacaggtgtgagccactgtgcccggccttttttttttttttttttttttaagataggttctcgctctgtcgcccaggctggagttggagtacaatggtgtgatcttggctcacggcaacctctgtctcacttgttcaagcaattctcatgcctcagcctcccgagtagctggaactacaggcatgcacccctatgcctggctaatttttgtatttttagtagagatggggtttcaccatgtcagccaggctggtctcaaactcctggcctcaagtgatccacctgctttggcctcccaaaatgctgggattacaggcatgaaccaccacgcctggcgctggcatagattccttttttttttgagacgaagtcttgctctgtcaccaggctggagtgcagtggcgcgatctcggctcactgcaacctccgactccctggttcaagctattctcctgcctcagcctcccgagtagccgggactacaggcaggcgccaccatgtccacctaatttttgtatttttagtagagacggggtttcaccatgtggtctcgatctcctgacctcgtgatccacccgccttggcctcccaaagtgctgggattacaggtgtgagccaccgcgcctcgcctagatttcttgattagtggctcctgaggggttctgaaacctggccttgtgtgagggttacctggggagattttgaacagttttctaggcctcattgtagaccccaaaaagaagcaaaagaggaactttgttaactgctttgccaagaygcaggtgtgtacatctgagctgtgtgactgagcactggctatatacagcagtgtcctgttctcccrtctcctctcaggacttgagtccgtgrccttctgctggggcccagggcccatctctcctgttagtgcttgcaaagctgttaagtaaccatccctctctgccatgcttcacactttgccctggagtgggcatcaagctctctggggttgagtttggggcatgggtgttttccattttcaggagctgggtggcacccctgggctttttcagttcccctctatacactgaagtctacttgggctccgaagtggacctcattctgagaagcattgctctctttctcctgcaccacctgccctggttgggaagcctgctgtccccatcaagagaaggaatgtgtgagctgcctggtgctttcccttgaactctctctttgtcagcactgcaccatcagccctgagcagctgacttgggttgcttcttgctctgagcagaactgaaacaaacctttgtgggagtgttatttgtaagcatctgtcattcttggctttggtcttcctaactctgttctagagctgggctgctcttgcggtttttatcaggtcctttcttctgtcatttgtaacatccttttgaattccacttcttggaatttacattggtttccttcaattccttccctaattcttcactgtcaggaccattctcagttatcggggcacagttttgcttgagggtttacaaccatcttgagggtttgagtcatctggccttttgagtctcagatattcagatggaactgatctctgaatgattccaatttttcttctttcttttttttttttttttttttttgagatagggtctcactctagttgccctggctggagtgcagtggttgtaatcttgactcactgcacagccttgactgccagggctcaggtgattcttccgctttcacctctcagcctcccaagtagctgggaccacaggcatgtaccaccatgcctggctacttttttttattttttatttttatttatttatttttgagacagagtcttgctctgtcactcaggctggagtgcagtggcgcaatcttggctcactacaacctccgcctcctgggttcaagcagttctctgcctcagcctcccaagtagctgggattataggtgcctgccaccacgcccggctaattttttgtatttttagtagagacggggtttcaccatcttggccaggctggtcttgaactcctgacctcgtgatctacctgccttggcctcttaaagtgttgggattacaggcgtgagccactgcacccgggctgtattttttttagtggagacagtgttttgccatgttggccaggctggtcttgaattcctgggctcaagcagtctgcctgccttggcctcccaaaatgctgggattacaggtgtgaaccactgcgcctggcctgaatttatcttcttgaagttgttttcctcagtggaggcatgattggaatttttttttttttttttttttgagacggagtctcgctctgtcacccaggctggagtgcagtggcgcaatcttggctgactgcaagctctgcctcctgggttcacgcctttctcctgcctcagcctcccgagtagctgggactacaggcgcccgccaccatgcccggctaattttttttgtatttttaatagagacggggtttcaccatgttagccaggatggtcttgatctcstgacctcgtgatccgcccacctcggcctcccgaaatgctgggattacaggcgtgaaccactgcgcccggcatgattggcattttgggctaaatagtttctgtccacaggaccgtcttgtgcagtgcaggtcttttagcatcctggccactcatagtgcccgtggttctcagtagaagctgtagaggatgttgggaaattggggtgggttggtcacagtgcctggcatctgtctcagggtaagggcttgggaggctcaagtgcagagtcgtatcyggatgccagcaacaccctgttgagaaactttctactatggtatgctcatcattctctgaagatgtcagggcctgtttgtttgtttgcctgtttctctcacttttgccttataatcagttcttccttgttggttagaatcatgtaaaggaggttgccttttctgtctttggagagcttaacttgacggcaaggtaagttgggagtttatgtgataaccctacttaggattctctgagcttcccaaccctgctgtcattagcatcctcagggttgcccattcttctttctggccaggtgtgtggctcactcccatggcagtatttcttttatctttgtctgtggatcccctggatctccttgataccaaagcaccagtaagtgtcctttctgcacccctgcccttagtgctcctcactgactgcttcctctcctttttcttgagcaagatacagtttttcactctcatgttacagttgagttccatcttgccatatttttataattcttgtgaaatttaccttgtgtttatcatccctactktatttttttatttttttattttttcgagacagagtttcgctcttttcgcccaagctggagtgcagtggtgcgatcttagttcactgcaacctctgcctcccgggttcgagcgattctcctgcctcagcctcccgagtagctgggattacaagcgcccaccaccacacccggctgatttttgtgtttttagtagagatggggtttcgccatgttggccaggcttgtctcgaactcctgacctcaggtgatccacccaccttggcttcccaaagtgttgggattacaggcgtgagccaacgcactcagccatcacccatactttatactgttggagtgtggatttctgaaaccataaagtatatttacagatgattttaaaatttgttttgtcccataaatgttagatatcttcactgttgtttcttctttttttagttgtctagtttcaaagttctgtgtggcatatttttttcctatctgtatttggtttaaaacattttgtttgctaggactccagccttaagggacgtgcatggtataccctgtccttagccaagaatcttactctagtatcttgagccaaggtcaaaaaagccaaacacagcattggaactgtawttatagaaaatccttcccaccccagattcctttttcctcccaaagccccagcttcccatccacccaccaacctggtcattaagcacatgtttgagcaccactgtgagccaggcgctggcaggaccagggcttcctgatccctgcccttgttgagcttacattctatttggagagtggaaggaggtggcagtgtgggtgtgagatctcttcccctttctgagtctgcccaggcttcataatccccaggggagcatttcttatgagtcttgtgagcaggaggaccaggtggcagttggcaggttggagtggtccctcaggttccgtacctccttatgcagggaaagaggggcctcatgcaggtggagaggggccaggccaccccattcctcactgcaggaggttgcagcccatgccgctaacgcctcctcagggagaaatggatccatcatcgctcccagcagtgcctcttctctcaccacagctatagcctgtgagaaatccctatgttcaggctccacccacacttgctggaccagaatttctggggctgggcccaagtccaggtgattgtggtgggcagatgagggtgacaggcaggagcaccctgtggggggaaacttgtgcctgttgcctgctatgaagcaccagtgtgttccacctcttccgtgtattcattcactgcactctccctctctgctgctctgggccgggcgcccagcacatcttcctactcagaaccagtaacctgggctccggttcccccttccttgccaattgtttccttccctgcctgtgtagcctcagggtgccttttaaactaccactgtgtgatggaagtatgaggtgcaaggatcttttgggcttgatgtgggggctgatagggagcccccaagccactgtgagttgaagtaccacgtaaggaggttctggagggtgctggagctgggccagaggaagcagcctggcgaaggaggcagggctcagctggatggtgctcgggctgcagaagagaaggtgcctgacaggtgtggaggcggcttttgtgccactggatgggaggccgggctgaggcgggtagagtggcacttcatgtgtcagagtggaggaatgttggcgaggctggtgttctggcaggagggcattgctgggtggtttgggttatagcgcctgccaggcattcactgagatgttggaggcaatgggaaatgtcaggctggtgcacagttgaaaaacaggtgacagacagttctgaagacatctcaggcaggaccctgaagtcgtaaagttgtgctttctgggtgaaatggcacttgctgcattgactgtttatacaacaataaccccacatatttgcaaggggtcctgttgcccacaacatggcttccctttccttttctgcactctgggtctgttttgcagctgaggaaacaggctcagtgaaggtttcccgtccccacccccccactcccaccccagtcccagactggatggttctctttgctgtgtgcccatgttgaggtggagtccttctgaaatcacacttatagcactgggtagaaaactggatatgcgtttgtgtctggtttgttcccagtccccagttttattcatctttagcttctcagcatccggtgcataatcagtgcttaatgaatcttgattggaaggtatcaggtgtagagcacctcaggatagctcctgccacatgtctgccctatgcagggtgctgagggatttaaacagccatggtgaccaacccaaagaggaggtggtacgtctgcagaagcatggttccccctgtcctattcaggggggttcactgaggtgggggcttgtcttggtctggggcatggggagaggcaacaaccttgcagaggggaccgccatggcagctccatgcctccttaaccactccaagcacagtttagtcctcactgtccaattttgtcattagcatttttggcacttggtttaatttgagggcatcaggagggatcttaatatgtggtgctttcccctatttgacacccctttatgctttgtcaatcaacaggagcttgaagaaatccgcaaatgtgggatgaaaaacttccgtaacatccaggttgatgaagctaatttattgacttggcaagggcttattgttcctgtgagtattgaacacttccacttcctaccagattattctttaaggtgatgtgtgtgctgttgggcttgtttttctgctccttagtaggctcttagtctaggcagccagcagatgcacagaagtggctgtcgctctagggtgataaggtagggagtgtagccttgggtcctgagtagagtcacatcttggcactcgttttgtcaaattcagggagtcctgagstttgcagatctgtagacacagagaaaaggagtgtgtctgtgctcctgctctttcctgacttccctgcgcctggcctgatggatcagcaggaccttcttctctgagctcctcaggaggggacaagcattcccctctagatattttgctttctctcttggttttgcattcatgtctctaaccctttggatacctgtatttcgggctttattcctggtcccctccaacctgtgccttccatttgtctcaagtcccttttcctaattgcccacatgttcccctcaccccatgtcttttctggggcttatgcctccagtgtctgcccccacagcccagctcccccatctcacagtcttctgccttctgatgggctcaaggccctcctaacgatggctttccttagcaccctcttagtgcctactcttttctgcatcctttgatcccctccccttcaagaggcttgtcttataattaactccagtttgcaatcccccttcctctcactctcctgaaaccacgtcacacccagcccacaggctgcccccactgttgtcacacctctagctcggcagtgctggcatcatggcccttgcttgcctcctgagcttttggagcacgggcagcattccagcccccagtcctgtgaccagcctgccactcgctcctgttctgccactccttcctcctcactcttaaacatgactcttgttggtctcctgctgttctcctgttctgttttgtctcgggaccctactactttcggcatcatagatgattatgccagacatgaaggattcccacacctgtctccattcctgccttctccccggaagctgcaccatctgtccaccaggcggcctcacttggtcattgtgtagccttcagctacctcagctcacacccttgtcctgcgtgagtgccctcctttcctgttcttcctcatccactcaccttctctgttccttttcattcccactttgcacatctgagcctctggcccttgccctgtgcctgccgctgtcctgtatataatttgttctcatggatggattggctgctttgccaaagcagagcatggagcatgcttcctcctgtagatgcttcttcctgatgctggttataaggtcatgagcatggagcatgcttcctcctgtagatgcttcctcctgtagatgatttctccctgtagatgctttcttcctgatgctggttataaggtgagcatggagcatgcttcctcctgtagatgctttcttcttgatgctggttataaggtgagcatggagcatgctccctcctgtagatgctttcttcttgatgctggttataaggtcatgcttttttttttttaagtccctgaatttgatcagcagttattggatttgtagtttatttccataatcatttggataactaaggaaagatatgctttgtaatgatttagtatgctcagaatgtttaaatctgggagcttccagtctgattttgaagatgagtcctttagatttctttaggcttgatggtgttagggctcagggcaaagggtgtgggtggcagagacacctctgcatgggaggggttggcctgtgagtgcagcccttgcctactctagggacctgaagatggccgggaccatctgacctcttgtcccttttctaattgagattgtgtagtctactgagcaaagaaatgaacagttaatctgtggctctttggaaaatgataaaaatgaatggaatggttttaagtggtaaggcttgggcagtctggccctgagaatttagtggcctgagagcctgctagccagctccacgggtagattgctgctgggcatgctctgccccaactcatgcaaaggcctccctctggtttcacgctggcaggggctatggagcagtgggctaagatcttactagggcaaaggtggaggctggctggtagaatccmagtgtgcttgggctgaggctctggggagctatccaggccaaagtttcaccttggagacggtaagcaacagccagggctgctcttgtccctgtgtataccacttcttctcggtcctctcccttgctttcttccagggcccctgggtttgtatgaggaatgtttcaatgaagtcttcttccttctccagagcagttaaggcattgttgacatctgacatccccagggtccacacttgtaccccaacctgggctttaggtcttcctgcattggacgggctgggccagcatgggaatctactatacaaactcacctgaggtctgcccagttggggtaaaagtagagccaggccgatgaaggcatggcagcccagccctggtccttagtggagagtggtgctgtccttgggtagccacctagcgattgccctggtcgtagtgcacagaggagggcaggtgggagggaaggctggggaggtacttcctagagacttcattgttgccaacgcaactctggtctattccctttaaacatttgtttttctgtaattttttttcatctaagatgctaaggtaacgtctaaggaagaaaatattacccataatcacatcatcaagaaattcagttacattttgtgtactgccctttaggaactagaggtgtggtagtcacccttcttgaagcttctagcccagtgaatgtgtttactcttaaccttcagcatacttcctctcagccttttttcatgcagtttcttttttttctttttaattgagttggagtctcgctctgtcgctatgcagtggcacgatctcggctcactgcaacctccgcctcccgggttcaagcgattctcctgcctcagcctcccaagtagctgggactacaggtgcgcaccaccacaccccgctaatttttgtatttttagtaaagacggggtttcaccatgttggccaggatggtctcagtctcttgaccttgtgatccaccctcctcrgtctcccaaagtgctgggattacaagcgtgagccaccacgctggccttcatgcagtttttaataaaccatttcataacttcataataatgttttggttttttgaggcagggttttgtgctgtcacccaggctagggtgcagtggtgtgatcatggcccattgcagccttgaatttctgggctcaagcaatcctcctgagtagccaggactacaggtgtgtgccaccacacccagccaatttctttttattttattccattttattttattttttgagacagtcttactctgtcacccaggctggagtgcaatggtgtgattttggttcactgcaacctcagcctcctgggttcaagtgatgcttatacatcagcctcccgagtagctgggattgcaggtgtgcaccaccatgcccagctaatttttgttcttgtttttgagacagagccttgctctgttgcccaggctggggagtgcagttatgcgatctcggctctctgcaacctccatctcccgggttcaagcaattttggctaatttttgtacttttagtagagactgggtttctccatgttggtcaggctggtctcgaactcccgacctcaggtgatccacccatctcagcctctcaaagtgctgggattataggcataagccattgcgcccatcctgtaacgtcttaaatttccactacaaaggttccagttcatccacatccttgctaacatttgttattttactttttttttgtttttacgttacagccattctagttggtatgtagtgctgtctcattgtggttttgatttctgttttcttcatactaaggatgtagaacatgtttttgcatggtgtgttttttgtttttttgtttctttttgagacagggtctcactctgttgcccaggccagaatgcagaagcacagtctcgtctcactgcaacctctgcctcccgggttcaagtgattctcccacctcagcctcccgagtagctgggactataggcgtgcaccaccacacctggctaatttttgtattttttggtagagacagggttttaccatgttggccaggctggtctcgaactcctgacctcaagtgatctgtccgcctcagcctaccaaagtgctgggattacaggcttgagccacygtgcctggcctgatgcactaaagttttaaattttttaatttaatttttatttttagagaaggggtcttgctctgtcatccaggctggagtgcagtggctcaataatggctctctgcagccccagactcctgggctcaagcagtcttcccaagtagctggcactataggcacatgctgcaacccccagctaattttaattattttttctgtagagatggagtcttgctgtgttgcccaggctagtcttgaactcccaggctcaagtggtcctcctggcttagcctctgaaagctctgggatttacagatgtgagccatcacacctggccttaaatttttaataaagaagtccaatttatctatttttaattttgttgcctatactttggtttgatttttaagacactgttgccaaatccaaggtcatgcaaattttcctgagttttcttctaagagttttatagttttagctcttaaatttggatctttgatccatttatatgtagatttttttttttttttttttttttttttttkgagacaggctctcgttctgttgcccaggctggagtacagtggcatgatcatggctcaccacagcctcaacctcccaggctcaagcgatcctcccacctcagcctccagagtagctggtactgaaggcatgagccaccacgcccagctaatttttgtatttttttttttttttttgtagagatggggttttgccatattgcacaggctggtcttgaactcctagactcaagtgatccgcctgccttagcctcccaaagtgctgggattacaccactatgccctgcctcatttcttattttaataatatgagtcttttctctttttccttttatcagtctagctaaagttttttcaattttgttgatctcttcaaggaaggtttcattaatgtgtgtgtgtgtgtttttcatttatctcctctgtgcttactatttacttctttcttgtgttattactttctttgttccttaaaatatccagttagattattgatttcagacttgctttttcaatgtaggtatttaaagctgtagattccctttgagcactacttttgctgcataacttaagttttggtatgtcatttttttttctgaggatattttctaatttcccttgtgatttcttctttgacccattgcttgttagagagtacgtttaatttccccataattgtgagttttctagttctgttattgatttctagttccctttccttctccctttccctttccttttttttttttttttttaaataaatagagatgggggctgggtgcagtggctcacacctatattcccagcatgttgggaggctggggtggaaggatcgattgagcctaggagttcaaaaccagcttgggcaatatagcaggaccccgtctctattttattaaaataataataataataaatgggttctccctgtgttgcccaggctggtctcaaactcctgggctcaagcgatcctcctgcctcagcctcccaaagtgctggaattacaagcatgagccaccatgcccccacccgcctagttccatttcttttttttttgagacagagtcactctgtctcccaggctggagtgcagtggtgtgatctcagctcactacagcctctacctcctgggttcaagcaatcttttgcctcagcctccctggcagctggggctacaggcatacaccaccacgctcggctaattcttttgtatttttagtagacacagggtttcgccatgttggccaggctggtcttgaactcctggcctctttcacctttttgcagttacatttgtagttagacctctcaccttctttctgcaagcttatttgcacagcagttgctcctaaaatccacgccctccggatgcctcattcctcctttctgcattgcccctctggcctttgatgggagctgcatcctgcctccctgggctcagcacttgcctgtaattgtcagttcttttctgcttcctgctaattgtgccactctgccttctctctcccctacttccgtctcctgtagctgtaatggttgagaccaatgagggcagccctgttttctgagggcacactggagttgttttggggagaaagagtatccccctacattgatggggctgttgagctcctatcacagccagacacaaggttctatggacagaggccacagagaagccaccctcctggaatccatggtctcttaagcactgagtgtggctccacctgcaaggcacttaagaccaaacagaagcagggcagcggtgggtgggagggtgacaatatctggactgcatagtggaaggcagtgtgagcagaaactatgaaaaaatataggcagtgtgaggacatatgtgtagtttgcatagatgtacagaaattaaggcctttgagagcaccatgtatgcacagagaacgttcttgggctgtgcagcagaggcctgacggcatcctggggaatggggtgtctggtgggattttttgtttgttttgtttttttcacttctatttttggtgtgagtgctgtattttttccattcttgggagaaaagtgaattatgtatgagaagtactcatggctatttgagcccaaaaggaaggaatggtctttgtcaaattcggttaatggagattgtgattttaattgtagatacaattcagaaggtagtttatgaacattatgaaatgaaagattggaaaaccagttctaaaatacttattcctggccgggcgcggtggctcatgccagtaatcccagcactttgggaggccgaggcaagtggatcacctgaggtcaggagtttgagaccagcctgtccaatgtggcaaaaccccgtctctactaaaaatacaaaaaattagccgggcctggtggtgggcgcctgtaatcccagcaatttgggaggctcagccaggagaatcgcttgaaccggggaggtggaggttgcggtgagctgagatcrtgccattgtgttccagcctgggcaacaagagcaaaactccatctaaaaaaacaaaacaaaacaaaacaaacaaaaaaacttattcctactatttacttccaaagggaatacgattgaactctttagtgttgaagtatttgttgccggccgggtgcagtggctcatgcctgtaatcccagcactttgggaggccaggggaggcggatcacttgaggtcgggagttcaagaccagcctggccaacatggcaaaaccccatctctactaaaaatataaaaattagccgggcgtggtggcaggcatctgtaatctcagatactagagaggctgaggcaggagaattacttgaacccaggaggcggaggccgcagtgagccaagatcgcgccactgcactccagcctgggcgacagagtgagactccatctcaaaaaaaaggaaatatttgttgccaaagaactgtattatgaaaaatccccaaaaccaagttgttgaaaacagtacaaagaagtcatcttcagaaaccaatattagaacaagatgaatctcatgtggcagattttttgattcaaataaccaaaaagcctgttttcagaagagacaataaatacttaaaggcaaggagggacgtggtggctgacacctgtaatcccagcactttgtggggctgaggagggtggatcacctgaggccaggattttgcgaccagcctggccaacatgatgaaaccctatctctactaaaaatacaaaaaattagctgggtgtggcggcaggtgcctgtagtcccagctacttgggaggcagaggcaggagaattgcttgaacccaggaggtggaggttgcagtgagctgagatcgcgtcattgcactccagcctcggtgacagagcgagactctttcaaagaaaaatcaatcaatcaatcaatcatacttaaaggcaatttacaaagttaagttcttgtgactttcgaacatggagtaaggacatattccatgttcagaagtcacaagaacttaacctcctaaacttaactcttttgggtttttttgtttttttgtttttgagacagagtctctctcgtcccccaggctggagtgcagtggtgtgatctcagctcactgcaacctctgtttcatgggttcaagtgattctcctgcctcagcctcctaagtagctgggattacaggcgtgtaccactacgcctggctaatttttttgtatttttagtagagatgggatttcaccatgttggtcaggctggtcttgaactcctgacttcaagtgatccactcacctcagcatcccaaagtgctgggattataggtatgagccactgtgcctggcctaactcagctcttgacaaggttccagagtggatcacgaaggcttgagagcatagaaaccagcctggggcagggccaggcacggtggctcactcacgcctgtaatcccagcactttgggaggctgaggcaggcgggtcacgaggtcaggagatcgagaccatcctggctaacacggtgaaaccctgtctctactaaaaatacaaaaaaattagccgggcgtggtggtgggcgcctgtagtcccagctactctggaggttgaggcaggagaatggcgtgaacccgggaggcggagcttgcagtgagccgagattgcgccactgaactccagcctcagcgacagagactccatctcaaaaaaaaaaaaaaaaaagacaaaccagcctggggcactccgagcagggcaagccgcgtccccttgttctctcttaacaggggactggactgtgtagggataggcagcccacagggctggtctcagtagacatccctgtggcagggaaagcttcagctttgttagttcactgggtgaaaaaggttagccacagggaaaggatgctgctgtggagtygccaccaagctaggcagaagtgacaacagtgcacaggacccttcagtccatctgaagcctggcatgaagaaggagcagcatgctagttagatccaaactaggatccagctcttcaggtcagccatgagtcctgtctgtggtgtcctacagccagctaggaacacaccacaaggacgtgccrtgtagcagcagtccaagtcagacaaccagaagacaccttgacttcctctgtggctgccagagagctgtatggtggtcttccctgcttcacagcagtgacatgaaacggtgacttctgtgggatgaaggactctgsgtctttacttgggaagggaaaacatgaagtggaatggggttttaggattcttgaaaggttgccatgggaaaggaagattagatttgaccacagggttagagctaggacaagtgggtgaaagaccccagatagttcggtgccatatggcaaagagcttcctcttagtcttagctgccacaaaatggctttgtgccatgggaggttgatatcaagagctgtgaaggatctgagatttttaccctacttgcagcctgaaaaggtgtcctgccaatttattggatgttggtggaagactcgagaaaagggccagttcccctcgtccccgcatcccacaaaggtgatgaggatgggcccagatggatacctgcagatgtggggggttgtgttccgggacaggaaggctgagtttaggggaggtctcaggccagtcactcaatcgtacttcacttgctccatttccaaatgcaagtgatggcagcactggcttcccagggttggtgttaggggaccaggaggggcggaatatgggctggagatggcacggaaaagcacctggcatctaagtacttgagaaactttggtcaaatttttttaaattggctttcccaggttgaaatgatcaactcttatttacatgcatgcattataatgactagaagcaaatacaggaaaatgttagccatactatatataaaagaaaatccactttaaaaccggtatctttctttctttataaatagcaagtgggccgggtgcggtggctcacacctgtaatcccagcactttggaaggccgaggcaggcggatcacctgaggtcaggagttcgagaccagcctggccaacatggtgaaaccttgtctctagtaaaaatacaaaaaaattagctgagagttgtggtgcatgcctgtagtcccagctacttgggagggtgaggcaggagaatcgcttgaactcaggaggtggaggctgcagtgaaccgagatcgtgccattgcactcctgcctgggtgacagagcgagactctgtcttaaaaaaaaaaaaaaaaaaaaaaaagacaagtgggctggtcgccgtggctcacgcctgtaatcccagcactttgggaggctgaggcgggcggatcatgaggtcaggagatcgaaaccatcctggttaacacggtgaaaccccgtctctactaaaaacacaaaaaattagccgggygtggtggtgggtgcctgtagtcctagctactcgggaggctgaggcaggagaatgatatgagaggcagagcttgcagtgagccgagattgcgccactgcactccagcctgggcgacagagccagactctgtctcaaaaaaaaaaagacaagtggataaaaagtctgtcctagaatttagacatggattgaaaaggtgttttttgattttttttttttttttttttttctgagacagggtctcactcttgccgaggctggaatgcagtggtgtaatcatagctcactgcagcctcaaactcctgggcttaagcaatcctcccacctcggccttccaaagtgctggagtttaagtttttgaactagtttagagtgtgtaaaattatcataaggaattaatttacatctcaaatgacttcctcaatacagcagtatgagcttagggagcacaagacagtcaaaggcaggcataacagaaaaacactagtcgtgttcatgtgaagataatgctgaaatcagctgggcgtagtggctcacgcctgtaatcctagcactttgggaggctgacttgggtggatttttgagctcaggagttcaagaccatcctgggcaacacggtgaaaccccgtctctactaaaatacaaaaaattagccggacgtggcagcctgcgcctgtaatcccagctacttgggaggctgagagacaggacaatcgtttgaacccgggaggcggaggttgcagtgctgagatcccaccattacactccagcctgggcaagcgtgagactctatctctaaataaatagataatgctaaaatctttggtttatttgacattgaaatgttgcagcttaagttggaggcaaattttctgcaatgttktataatatatatattttttacaacaaaaccatgttttttcattaacatcccttgttatttctgagtggccttcccaaagggcaagtttagctctaatgttgaaattcacttgtagagctgtaggcctttacccggaaggtatatcttatgttttaatttttgcatgcctctttcaccaaaaatctctgggacaggcacatagtttgtgtgacttatgcacacctgagccactcctttgaccatccacagatccccagactaggaaagaggcccagagaagttcagatgagtttggccaagttccctgggtggtgagaggcctggcctgcctcatgtagtaacagaactgcttcttttttttccttcctctttttggaagaaaaaagaggcaggatctcactgtcttgtccaggctggaaggcagtggcgtgatcatggctcactacagccttaacaactaacaacttaaaactatagcctcaagcagtcctcctacctcagcctcctgagtggctgggactacaggtgtgcaccagcagcacgcacagctaatttaaaaaaattgttagcaacaaagtgagatcctgtctttacaaaaggacttgtttttgttttgttttgtttttttgagagaacaccttgctctatcgcctaggcaggagtgcagtggtgcagtcttggctcactgcagcggtgtgatcttggctcactgcagccggtgcctcctgggttcaaccagttctcatgcctcagcctcctgagtagatgtgattacaggtgcgtgccaccacgcccagctaattttttgtatttttagtagagacagagtttcaccgtgttagccaggatggtctcgatctcctgatctcgtgatccacctgcctcggcctttttttagtatagatagggtttcttttttttctttttctttttctttttgagatggattttcacttttgttgcccaggctggagtgcaatggcacaatctcagctcaccacaacctctgtctcccaggttcaagtgattctcctgcctcagcctcccaagtagctgggattacaggcatgtgccaccacgcctggctaatttttgtatttttagtagaaacggggtttcaccatgttggccaggcttgtctcaaactcctggcctcaagtgatctgcacatttcagcctcccaaagtgttgggattacaggcatgagccactgcgcccagtctgtttttggcttttttgagacaggttctcattctgtcacccaggctagagtgtagaggtgtgatcatggctcactgcagcctcagcctcctgggctcttgtgatcctcctgccttagcctcccaaagtgttgggattacgggcatgagccactgcacccagccaaatctgcttctcttgagctttgcccatgtgtcaggcatgtaggactttatagtccttatctctcatcataaactctgggtacaggctgttgctactcccattttacagatgtacaggaacattctcagactctttaagctaggaagaggcaaagtctgaggctagacctgctaacttggggccagatggcctcattcatgcttcaccccagctcctcggacaggacctggcccacagtggggaacaggggaggttggtcagtcctggacaatcagtgaagacctttagcagatttcaccaaccaaaagtcatgcaggaaagtgygcgcgcgcgcgtgtgtgtggtatgtgtgtgtgtgtgtggtgtgtgtgtgtgtgtcttactctgttgcccaggctggagtgcagtggcacaatcttggctcactgcaacctctgcctcccaggttcaagtgattctcctggctcagcctcccagtgtgccaccacacccagtgagggaaagctatttttacatggctcaagcagtgtaaatgacaatgatgtttacttacttccccccaccaccaccaccatttaattctcctcttgaaaactaaaagctggctgggtatggtgcatcactcctataatcccagcactccagcactttgggaggatcacttgaactcaggagtttgaggccagcctggacaacatagtgagacgccatcactataagaaataaaaaaatagctgagtgtggtggcatatgcctgtagtcccagctacttgggaggctgaggtgggaggattgctagagcccgggaagtcaaggctgcagtgaaccgtgattgcacctctgcactccagcctgggtgactccccacagatgaatatgctgacagtggtttcagctgctcggtggtgattcagacctggacgcgtggcttcagtagccctggggccacactgcctgcccgcagcctcctgtcttgctctatgctattccttccaagtccctgccatctagtctttagtcctctctgcctgggaggcctcttccactcctcagccttatgtcatcttatccatcctttaaggcccttgctccatgcctcccctcccagggcagggcttggatgtaggagaatgtggagaactggcgcacgccagccttgctccccagcagaggagctctgtttactggagtgcgtacttaggccacggcttgaagatatggggctggggtgtagggctgtcaagattgttcctggggccaggtgcagtagttcactcctgtaatcccaacactttgggaggccgaggccggcagttcacctgaggtcaggagttcaagaccaggctggccaacatggtgaaaccccatctctactaaaaatacaaaaaaaaaaaaattagtcgggcagggtagcgggtacctgtaatcccagctacttaggaggctgaggtgggagaattgcatgaaccagggaggcagaggttgcagtgagctgagatcgcgccactgcactccagcctgggcgacagagcgagactccgtcttaaaaaaaaaaaaaaaaaaaaaaagattgttcttgggctctctgtgaagcttggatttctttgggttgggtgtgccatggcaagtgccatggcagacctgggtgagggaaaagggagtacaatgggaagggcttccccagctctggagataggtagggttggggagaggccaaaagactctttgctgagtcatctctcaggctcctggggccatcagagtgtccaggccccaaaggtggttttcgggtggttctaggggcaaggggctagggcatggtgctggccctgcctggtgatcacctgttgagtgaccagctcaggtccccagggtccagccattgagctgactactgtttctaccctgggaagattgagctggccaggacttggcatcaaggcagttatttggacttctagtactcacagtgtattctggttgggttgtaacttacctctggtacaactctacttgtatcttcagaaaagatcaagagatatttgcaaaaacataatatgataaaggactgtctaaaggacaaagaacacttaaaactctataataagaaaacaacaataaataacaccgtgcatctcttagaatgaccaaaatccagaacactgccaaatgctgctgaggacgtagagcaacaggaactctcgctctttcctggtgggaatgcaaaatggtgcagccaccttggaagacaagttaggcggtttctttcatttatttattcataaaatctttttaacaaagaaattgagtctctctcttgcccaaaatggagtgcagaagcgtgatcacagctcattgcattctcaaactcctgggcctaagaagtccacccttcttagcctctgaagtagctgagactacaggcacatgccaccatgccaggccaatatatttattttgttattattttttgagatggaatcttgctctgtcacccaggctggagtgtagtggcgcaacctcagttcactgcaatctctgcctcccgggtttaagcaattctcctacctcagcctcccaagtagctggactacaggcgtgcaccactacgctctgctaatttttttgtatttttagtagagacagggttttaccacgttggccaggctggtcttgaactcctgacctcaagtgatctacccagcttagcctcccaaagtgctgggattacaggtgtgagccactgagcctggcccaggctaatatatttaatttttttttttttttttttttgtagagatggggtcttgttatgtttcacaaactggtcttgaactcccggcctcaagtgatcctccctccctggcctcccacagtgctcagattacagacatgagtcactgctcctggcccagtttggcagttttgttttgttttttttttgagactcagtctcgctctttcgtccaggccagactgcagtggcgcaatctccactcactgcaagctccgcttcccaggttcacaccattctcctgcctcagcctcctgagtagctgggactacaggcgcccaccaccacgtccagctaatttttttttgtatttttagtagagacggggtttcactgtgttagccaggatggtctcgatctcctgacctcgtgatccacctgccttggcctcccaaagtgctgggattacaggcgtgagccaccgcgcccggccggcagtttcttacaaaactaaacatatgtcttaccattggatccagcaattacattccttggtatttagccaaatgaattgaaaacttgtatccacacagatgcttataacagctttattcattaattgctaaggtttgaaagcaaccaagatgtccttcagtgggttaatggataaataaattgtggtatatctagacaaatgacattcaacactaagaagaaatgagtctgggtgcagtggctcacacctgtaatcctagtactttgggaggccgagacaggcagatctcttgagcccaggagtttgagaccaacctggacaacatagcaaaacccagtctctataaaaatacaaaaaaattagctgggggtggtggtgcctatctgtagtctcagctacttgggaggctgaggtgggaggattgcttgagcctgtgaagtcaaggttgcaatgagccaagatcacgccaccatccagtgggcaacagagcaagaccctgtcaaaaataaataagtaagtatgaagtgggggaaaaacaagtaacggctgggcacagtggctcacgcttataaaccctgcattttgggaggccgaggcaggcagatcacttgaggtcaggagttcaagaccagcctggccaacatggtgaaaccgcatgtctactaaagatacaaaaattagctgggcattgaggcgggtgcctgtaatcccagctacttgggaggctgaagcaggagaattgcttgaacccaggaggcggaggttgcggtgagccaagatcgtgccattgcattctagcctgggcaacagactctgaaaaaataataataataaaaagaacaaatagcttctaacgacaaatttatttctcacttattgaggctgggaagtctgaagatcaaggtgccaacagattcagtggcaactgagggccggcttcatggtttatagatggtgccttttcactgtgtctttatatgatggaaagggcaaggcagttctcaggggcctctttgataaggacaccaatcccatcatgacctaatcacttcccaatggtcccaactcctaataccatcacattggtgattaggtttcaacataagatttttggggagatacattcagacatagcagctacatattgcatgattccagctatcatgtctgataaccacacaaaacctatagaatgtgcaacaccaagtatgagccctaacataaactagggaagctgagtggtaatgatgtgttaaggtaaaaggttcattgrtggtaacaaatttgcccctctggtgagggatgctgatagtgggaaaagctgtgtgtgttcaggggcagggggtatttaggaattctctgtcctttcctctcagttttgctgtatacctaaaggtgttctaaaaagtaaagtctattttttaaaaaagtatgaagagaccaggacatcaatctcaagccccttctcagtttagcagatagcttgctctagaaatacttttgggtggctgggttgtcctgaaggtggcagggcttcagttgatacttgaatcccttgaaataaattgatttttcagataaacaattaaaacattcctgtcttggccataggtttatgaaccatggtgtgttcattttgatctctctttccttccaggacaaccctccatatgataagggagccttcagaatcgaaatcaactttccagcagagtacccattcaaaccaccgaagatcacatttaaaacaaagatctatcacccaaacatcgacgaaaaggggcaggtctgtctgccagtaattagtgcsgaaaactggaagccagcaaccaaaaccgaccaaggtaagacatgtgcctgtgtcttcctcggagggggtctttgggggtgctgctctggggtgggggcttctggtaccagatcagacagaatccagagaatctttcaggtacacgaaaaatgtagctgaggtcctgtcagaccttgtgggaatggctcatctcagctgaacttttgacctgtatagggtttgaggaggcctttccagtgctcagccctgggctgccatccacagtgggaacacacatggacagacaagcccagtggcttgctgctggtgcagagaggtgcaggcactggtccctggaagggatgaaggactgtggggctgcctacaaggggaagggagagtgggatttaaggtggcctcatgcagtagttagtgcctgaactcagacttgaaggaggaaaggaggttggagagggccttccaggctataggaagggcatgggctagagcctagttgctcgggtgatgtgaggggagggacagaggcagatgtaagggcagtattcccagatgaaggcacgtagttggctttagtgggcctgggattccctggagttggatgtggctgtgcgtggtgcacatgtctgtgtgtggctgtgtgaacataaacatgctcattcttctgggaagaatatttgagtcagtattgtggttgtcctcccttttgtcccctagaagtgactagtttgttatggactgtgtctggttttcatttaattctagactttcttttgaagtcctaatctcatattttgatggcttccttttaagtacctaaaccagtataaagtctgtttagattagagtggatgaagctggcacttgagaggctgcaagtggagggtttcttttaggggtgctgctctagggtaggggctcatgggtccttcctgatgccagatcagacggagtccagagaactcctaccttaccaggtgcacgcaaagtatggctgaggtgccaccagtccctgtgggaataactcagctgaacttttgacctgcacagggattgaggaggtcccttgttttagtgattgaaaaaagccttggaaggtggagttcaaagccttgcgcaagaaaaatcaagcctcacttgttggaagtaatcaccatgaaaggtgcccattagactcccacactgagtagaagaaaggagtgggtgctaaacattcagtcagggcagaacagtctctagtgggcttggtccttgtttgtgtacaagctgatgtttataaaagcttgacacagttcttctcagtgcctggttttttcttttcttttcttttcttttttggaaacggagtctcgctctgtcaccaggctggagtgcagtggcgcgatctctgctcactgcaacctccgcctcccgagttcgcgccattctcctgcctcagccttccgagtagctgggactacaggcacccgccaccacgcccggctaattttttgtatttttagtagagacggggtttcaccatgttagccaggatggtctcgatctcctgacctcgtgatccgcccgcctcggcctcccaaagtgctgggattacaggcgtaagccaccgcacccagccgattttttcttttcttttcttttttttttttttttttttttttttttgagacggagtcacccaggctggagtgcagtgatgccatcccagatcactgtaacctccgcctcccgggttcaagcaattctcctgcctcagcctcctgagtagctgggattacagccaccacgctcggctaatttttgtatttgtagtagagacggggtttcaccacgttgaccaggctggtctcgaactcctgacattaggtgatccacctgcctcagcctcccaaagtgctgggattacaggcatgagccatcatgcccggcgagcctggtttttttctgtacagattcctagcactgtcgaaaacctatagctgcatttgatcaagagtgttcagtaattcctggagtccttgccgagtcatgtctgttaacccatcgtgcctggggagtggcagtccttccaggccaggttgcccaggaaagccctgcacytcaggttctggccacaaagagttctgaggctcctcccttacctgtagactgagagggtggggctagggccagggaggctctcaggagatggatgcacgtgctttgccacctctcatggggctgctgcatagaaggccgtggcagggttattcactttttaccttcctatccaggtgcactgccaaaatgctctgctttttcagactgtggctgcttctcccccacccccaagagccaaataacttaggggcagcttttaatttttttttgtaaaaagtactgttgacttgggatttttaaggtaaaaattttggtacaggagctattctgtgtgccatgatggacagaactggaattgctattttgtgatttgggacagttgaggattccttcctagaacattattatgtagattgtttgtggcatggccttgatccccatcctcacatacatcaagaatgttgttccttgcacttgacggccacattcccatgtttgttatctattactgcattataacccctatcaaaactttgtggcttaaagtaataccagtttattagtttttactctggaggttggctgggcttagctacatggttctacagctgactgttcattcctggggtcactcatgcagctgtattgaggtgggaactcaacttggctgggaagagctggtaggcatagtgcacatgtgcggaaatggtattagctaaggcacttcggttctctttgtgttctcttattttccacaaggctacattggaccccttcatagcatggtggtctcagggttccagggtgaaggcatagaactggtacrgtgtcacttctgtggattcttttggtcaggcaagtccagatttaatgagagggaaaatagacttcagctcttgatgggaggagtatgcagsatggsagacatgatggcagaggtgggacaggcaggcaaggttgctgagtccccttgctgcctcctcaggcccacttgggcctgcttttcccaaatggcagctcctctggacatgccattccttctcccacctgcctgattcttcatatgttgggtgtccctgtttttctggtgctatttcctgactgctgttcagctgccactgtcctgcaaagcctgcctttttaaatgcctcaccattccttcatttgtttcttaaatatgggaagtgaaagtgccacctgaggccgggcacagtggctcacgcctgtaatcccagcattttgggaggctggggcaggcagattgcttgagccaaggagtttgagaccagcctgaggaacatggtgaaaccccgtctgtaccaaaaaaaaaaaaagaaagaaagaaagggaaaaagccacttgtgccaccctcctgctgtaatcttccagcgctcttcctttgtctccagagcacctgctcatgatttttgtctcctgcccttgtccttagaaacttcagcgttcccaattatggcttctctcagatccagccttgaagttctttgacctcctcaattcacaacctgtagctgactttagccacccacaagtacagaaaagtaagcataatggaagaaatagtaatatgaaaagatgctcatatgacccagcaattccactcttagctatatctacccaagagaaatgaaaacatatgcccaataaaaacttgtacacagatgttcatagcaccattattcacaatggataagaagtgaaaagagcccaaatgtccatcaattggtgagtgaataaacaaaatgtgagccaggcgtggtggctcacgcctgtaatcccagcactttgggaggctgaggcgggtggatcacctgaggtccggagttcaagaccagcctggccaacatggtgaaaccctgtctctactaaaaatacaaaaaattagctgggtgtggtggcgggcgcctgtaatcccagctacatgggaggctgaagctggagaatcacttgaacctgggaggcagaggttgcagtgagccaagattgtgccattgcactccagcctgggcaacaagagccaaactccgtctcaaaacaaaacaaaacaaacaacaaaaaatggtgtatctctacaatgaaatattatttagccataaaaagcaatgaagtactgtcttatggtacataaaccttgaaaatatgctaaatgggccgggcgcggtggctcacgcctgtagtcccagcactttgggaggccaaggcgggcagatcacaaggtcaggagattgagaccatcctggctaacatggtgaaaccctgtctttactaaaaataaaaaaaattagccgagcttggtggcaggcgcctgtagtcccagctactcgggaggctgaggcaggagaatggcgtgaacctgggaggcggagattgcagtgagccgagatcacgccactgcactccagcctgggcgacagagcaagactccgtctcaaaaaaaaaaaaaaagaaagaaaatatgctaaatgaaagaaccatccatggaaggccacatattgtatgattccatttgtagttgagcctcattgttcatagagtctgcgtttgcgaatttgcctactcactaaagttttttgtagccccaaaatcaatactctcggcactcgtctatcacagatgtgtgcgtgtgcagagcagcaaaaaatttgaagtaccccatgcacgtgttccagctgaggttgtgtggttgaacagtgcgatgccctgccttcttgtttcagctctcaactgaagcaagtgggctgtctaatgccaaacttcttggattttgtgctttttgttggtgattttgctttggccccaaacgtggtgctgaagtgctgtctagtattcctgagcacagaaggtcatgatatgccttttggagaaaatacatgtgtgagataagctttatttgggcatgagttatagtgctgctgagtcaatattacctattaaataaggtgtctttaaacacacataaaacaaagttatatattaatcagctggcaaaaatgtgagcagaggcttgtttgaacctaaacctctgtttcccttaggagcaatgattcagtatcattaattcaatgttcatggcaagtttatagaacataagcactacagataaaattcagctgtatatgggatgctcagactagggtggatccattgagacaaagtagattagtgattgtcagggtctaggaggaggagaataggaagtgactactgagagtgggttttctttttgggggatgaaaatgttccaggctgggcgtggtgggtcacgcctgtaatcccagcactttgggaggccgaggtgggcggatcacaaggtcaagagatccagaccatcctggccaacgtggtgaaaccccgtccctactaaaaatacaaaaaaaattagctgggcacggtggcgtgcacctgtagtcccagctactcaggaagctgaggcaggagaatcacttgaacccgagaggcggaggttgcagtgagctgagatcacgctactgcactccagcctgggtgacagagtgagagcgagactccatctccaaaaaaaaaaaaaaaaattagccaggcgtggtgacaggcacctgtaatcccagctacttgggrggcaaaaaaacaaaacaaaacaccccccccytttttttaaagcacattccatggaaggctacaacattgcatatctttttgggttgaaggtacattgacattttattctttgacaatgaagctccctggatttttatgaaaaggaggggaaatcacaaatattgtttacatccgctattgcagagaaactgtcattaagaacaaaagggccaggcacggtggctcatgtctgtaatcccagcactttgggaggccgaggcgggcagatcacgaggtcaggagatcgagaccatcctggctaacacggtgaaaccccgtctctactaaaaacaccaaaaattagccgggcgtggttgcgggcacctgtagtcccagctgctgccactgcactccagcctgggcaacagagcgaaactctgtcttaaaaaaaaaaaaaaaaaaagaaaaggaacaaaaggaaggaaatattataggctttattctctgatgagaatatagtgagagtaaaaggtaaaattggctaatttgttgtgtgggttttttgttttttgttttttgttggggggacagagtctcactttgtcacccaggctggagtgcagtggcataatcttggctcattgcaacctccgcctcctggattcaagcatttctcctccctcagcctcccgagtagctgggactacaggcgcatgccaccacacctggctagttttttgtattttagtagagacaaggtttcaccatattgcccaggctggtcttgaactcctgagctcagacagtctgcccacttcggcttcccaaagtgctagggttacaagtgtgagctgctgcgcccggcctgttgtatgtttttaagcccctacattttgcagaaaaaaaaagtacttctgaggagcatttgggtcatggaagagaccaagaacccagggctggatgttttataaaatataattttaatatgctgtcctatatatgaaaaatgttgatagagggccacagttgtaatttgtaaagcagacaatctgtcaggtgttcttactagcaaaataagttcagctcagctgaagtttattatagtttagctaaggagccagaaatgcacccaggggaacagcgaaagaatgaaatacttatcagaactactaagtaaatttaaaaatactcagacttgaggccgggcatggtggctcatgcctgtaatcccagcactttgggaggatgagatgggtggatcatgaggtcaggagatcaagaccatcctgggtaacatggtgaaaccccatctttactaaaattacaaagaattagcaaggcgtggtggcggatgcctgtagtcccagctactggggaagttgaggcaggagaatcccttgaacccaggaggkggaggtttcagtgagctgagattgtgccactgcactccagcctgggcgacagagtgagacgccatctcaattaaaaaaaaaattcagacttgatcaaattagtgaaactataaaaaataacgaaatagacaaatggcatcttttgagaaataggtctttaaatttttattttgccaggtgcagtggctcacgcctgtaatccagcactttgggaggcggaggcaggtggatcacgaggtcaggagatcgagaccatcctggctaacacggtgaaaccccgtctctactaaaaaattacagaaaattagccgggcatggtggcaggtgcctgtaatcccactacccgggaggctgaggcaggagaatggcatgagcctgggaggcggagcttgcagtgagccgagattgtgagctgtgattgtgccactaactcagcctgggcgacagagcgagactccatctcaaaaaatatatatatatattattttttttttgcgatagggtcttgctgtgtcactcaggctgagtatagtggcacaatcacagctcactacagcctcaatattgtgggctcaagcaatcatcccacctcagcctcccaaggagctgggactacaggcatgtgccaccacaaccggctaattttattttttattttttgtagaggccaggtcttgctatgttgcccaggccagtctcagactcctggcctcaagtgatccttcctccttggcctcccaaagtgctgggaatacaggtgtgagccaccaacctctgcattagttaccaaggtgatgatagtgagaagtagagagcctaagtattcatatcagagagtgaggtgaaaactcctgagcgtgcccctaacgaagtactcagcctgtccttagcccagtgaggtttctaaaatgctaatgyggtagtaattctcctgttacagggccatttctaatcatgggaaaggaaggggagccacctatttgtgctcttaggcgactgtggctcaatttccagccctgaagtcaagaacagccaggaaaagggagcagtctcacaccgagggtggtgtgcactgaaatacactgtggccagtcagccaagggtgggcttcgtttattaaataaataaataaatgtttattaaataaaaatatacctccagggcctgctgcctctagaggtacaggtggcttgtacagggaggtgataccacctacccctgaagaggcttagagactgaattagaggccaccctggcctgcagagagctttccaggccccttgcccctgcttgctgttcacagtccaccctccttgcccatccacccccaacaaacgtggaacctgtcagcattgcatgcgcaatgccctcctcgcctctgccccactgcttcacctctacccactgtggtcacaggagccctctctttcccattctcaccaggcacagtaaaaagcagaggttaggcaggtgggttttggacaccaggccaggagtactttgtgctgtggccctcacttaatgtgtgctgttgaatgattatgcctttgcatatgactcagccagcatcagcattttgttttatttatttacttttgagacagagtctcgctctgttgcccaagctagagtgcagtggcacgatctcggctcactgcaactgccgtctcccgggttcaagcgattctcctgcctcagcctcctgagtagctgggactctaggcatgggccaccatgcctggctaatttttgtatttttagtagagacggggtttcaccatgttgcccaggctggtcttgagctcctgacctcaggtgatctgcctggctagcatttgcattttaatccatttcttgtaatgctgaatgaacaatatgagcccttaataaaggaattgaccaggtgcagtggcttcatgcctgtcatcctagcacttttgggaggatgaggcggtaggatcactcaagcccaggagtttgagaccagcctgggcaacatagtgagaccccatctctacaaaaaactaggccaggagcagtggctaacacccgtaatcccaactactctcaaggccaaggtgggaggattgtttgagcccaggagataagactgcagtgagctgtgattgcaccactgtactctagcctaggttaaaaaaaaaaattagctggacgtgatggcatgtgcttgtagtctcagctactcaggaagctgaggcaggaggatcatttacacccaggagtttgagggtaccgtgcagtaaagtatgattgagccactgcactccagtctgagtgacascaagactgtctaaaaaaaataagaaggaatttgtggcatcagcagttcggagaagaggggcactgttttacagtgggaaggaacattctgagggtgctggtcctgacagggtcagggggcaactgtggcaaagtatgtgaggaggtgtgggtagcagctgcttctgattccccactatccttccaccctggggcacgtctgggctacggcacctagggggagtactgtggcacccatcagagccatcagcgtgacatctgcctgtggtcttgacaatgtgatgcgatggcggttgtcagcttcccattggctggccccagtgaccctttctagagggttcagaaactcctaagggtcttccagagttgggtcattgcgcattgacaagtgcagcgccatcacatacccttctctctagtgcccactcagtcaccttaaccgaaacttccctgagccgagcatggtgctgggtgctgggctgatgcagggaagttctacccggtcctgccctgaagaaagtgaccctgtgtgcatgcatgagagtgagcagtcagttcaatactaggcctcctatctccagagtacacaagaggactggattagccgggcatggtggtgcacgactgtagtcctggctacttgggggactgaggctggaggattgcttgaggtcaacccaggaggttgaggctgcagtgagccaagatggtgccactgcactgcagcctaggtgacagagtgagaccctgtccctcctccccaaccccccgccaagaaaaaagggctgggagtgactgagggctaagacctccccaggtgttaggtcaggaaggcttcctggaggcggaagcacatcactgtgaacaattatccactgtagtgttagctatttgttgtccatcagtgtcttctaatcacagaggaaagatgagttttctggcagtcagaattttggataaataggaggcagctttggcttaaaagcacattagctgtaaatcagttgtaaagccagagttttgttcccggattagctgcctcttgcctgtgccatttctgagactgtgttaaccccccatgcsttgtccttctcttggcagtaatccagtccctcatagcactggtgaatgacccccagcctgagcacccgcttcgggctgacctagctgaagaatactctaaggaccgtaaaaaattctgtaagaatgctgaagagtttacaaagaaatatggggaaaagcgacctgtggactaaaatctgccacgattggttccagcaagtgtgagcagagaccccgtgcagtgcattcagacaccccgcaaagcaggactctgtggaaattgacacgtgccaccgcctggcgttcgcttgtggcagttactaactttctacagttttcttaatcaaaagtggtctaggtaacctgtaaagaaaggattaaaaatttaagatgttctagttctgctctctttgttttaaaaatcactgcttcaatctacttcaaaagaatggtgtttcttttcttgtccaattttatccaaaatcttcaagttacatttaacccataaggtttaaaaaaaaggaaaaaaaacggttgtggttccctttcttccctacccttgccactcccactttctggcaccgagtttatttttcacttacttacttccccagaccccgggctcgcctccacaaaggagaaragactgccctggcggtcctggtggcttttcttagcatgtgtggcactgttgcccagtgtgggagttggtttaaattctcctgactccagtttataacatccttttaaaaaatttaaaaacaaacagccacacccctcctccagtccttctcctcagttcttgtgtgaaactccagctgatgttaccacagtaacatcagttaattgggcaagccctgatgtcagtgtgtgtaactgacctctggcctggcctgcacagagaagccctataatcacaggtctgtggtggccccgaaatggggggcctgctagtcaggaggatgctgtgcacactgtgtgtgatgaatctcgccagaaaggctcctgaggtcccaggttggcacttctccctgcagccattgtagaagatctgctggtccttgcaggcaaagctacagccagaatgtccgtttgaaactcctagctcatctgtcaccgagcttcatccgaatgtgccacggagcttgctctccacttcctccgtgcagykgccctgccacagccctccctcggcacactttgaccctttgtaggattggaattagcaggactcggctatttaaagcaccagtctggggtcgcctgggcccctgctgaccccytcctccagagcagccagcccagcccgggaacaagacggacttcctctcccttcggactcacagcctttgcagagtcaagctccacttgaagctcactcagtaatatcctttcaatgtgttttatattgttttgactgcctttttttgtagaaataaaaattgaccttagaatttatcgtcagataaacttgtaaagatttgaatattaatgtcttttcaaggcaaatgggattgtccccgcactagtagagaatccatgtcgctctgacaccccaaggaagccgacgatccaaatgccgtgtgtcaccaaccccgcttctgccactggcggcttcccttcttggctcttgggggggactagatcctgtggagaagatgacttaaactttgctttttgttttaattttaattctataacttgagatctttccggggcctacaggcgtgtaagacagcttggtctggtctgtgcagaagtggggagtgatgggyaggttcggcagcctaacattgttcaggcgcatggcccctgcggtgtgtacacgaactcggcttcttttgtcctaggtacgccaagggcaggtttctggagactcccttgtgcccgggatggcaagggcaccgggctggygtttccacatctgtcttcattagcagaaaagtgatgatggattttatttcactcacactccagtttgtaataaaatgccaaattctgtcagctatccaaacaagccaccatttgttcttgttgcttctctggatccagaaatgttgccattcttggaaactgtcccattgcttcgtatttctgccaacgtagctctgcctgcctgtcaacccctcactgcactctgctcatcacgggaggatacctgtgtgccggcagcccctcagggactctcagccctggcactggcaccccagggttggccccgtcagcagaggcttggctttcgagccagtgggtgtctctcctttgggcctgggcggcttgctcctgccagccatgccttcagggtaggctctgagcaagctggcgaacagccctggctgctccaaaaccaaaaagctgggtcctctggaggaggggcgagctgtggagcagccacccactgctgccccaagctcactcaggaattcacacccgcctggtttcttgaagtgtgctgggtccttccctctgctccctactccccaccacggcagagaataggctttytaagatgctgcgatcccgttctgctgcccgtaataaaaatgctctcagacactggttagtcgtgtgggtttcttccttcctgggagcgggcagtgccaggggcctatgctcttggagatgggagggctggctggggcccaggtcctggggcttctgatctctctccccattcccagcctctccaaaagaggtacatagaagtgttcctgcctccctagagggaaggagatgaggtataatcagcaagaaagccggagacttcagacagtcggggcctgcagagggcgctcttgggcgtctcgttgaggggacagggactaaagtgtgggtgcatcacttacatgcgtgggtcatcctggagcctcctgggagtgttaacaatccatgtttagaagaggcaaacctgcggtcccaagaggtcacagaattgataagggtgtgcctgtgggtggagctgggccatgtccatgaatggtgccagccagaaacactctgagtccccagtacagcccactgccagggtgctgcggcagtggtgctaactcagcaagggctcagccagacccaggacttttttggctaggccttccctgcctggaatttgacaccagctgagactaggcctgcactgttcagctggatctgcaggtcttggggaaggaaacttcttggggtgtcattttactagcctttaacatacctagcactttaccctctgagtctcaggagagccctgtggcatccttatccctgcttttaaagacaaccaagacccctggcctgtttttgttcacattctgactgcagagcctgttgcattccaccatttggcatatttcttcccacagggtccctctgagcccagaaacagccagttaccaccctccccagagccagagacctttaagcccctctgtcaacttcctcttccctacagccaccagccaccatttttggccttgttcactattaattgttcagcatgaaataagcatccatttcatcactcctgtacccgctgcagcctgacttctgtcacctgctgccccttgctgcttctcctttcatttggtgccatctaacccagccctgaaagaagccagagctgctctcagcatttcccaccctgtcctgcctggctcttccttctctctctgcttcctggatatggcatgggggaaccgggcaccaacccagaacagaggggagctgagggtaccattgctcccagtgcagtgcagtgcctagcctggtccatgcctggtaagtggccatttcccagattattggaacgtgttcttgttcatagagggcccctagggaaccctggaggcctcagaggatcagagtagaaaggaccaccgtgcagaggcgataactgaggccttgggaaggaagtcacttccagagagcattccccacccggtgctggccaggttcagaaacccccctgtggctccacatgttgccgtgggtttctcctacatcttcctctgtgtgtcactggatgacactggatgactgtccctgtatgtaccagactgggagctccttgcagaccaggccatgtcagctccagccctggcctagcacagagtggaccctccagacacgaatgccgagtgggcggataacagtgaaccgcttggctaagacactgttgctgcccccacagcccctgtggcccaccagtcaccaccccaacaggtccttatcactttcacctcctcgtgagatgggcctcattataatcaggtgggcctgattatcctaccagtctatgccccctcacttcagtttttttttttttttttttttttgagtcaggctcactctgtcacccaggctagagtgcagtggcatgatcactgctccctgcagcctctacctcccaggctgagtcgatcctcctatctctgcctcctgagtagatggaactacaggcttgtgtcactacacccggctaatttttgtattttttatagagacagggttttggcatgttacacagtctggtctcaatctgctagcctcaagccttcctcccgactcagcctcccaaagtgctggaattacaggcgtgagccactatgcccagccattattttttcttttttaaataacagaaataaggtcttagtatgttgtctaggctggtctggaactccagagctcaagtgatcctcccacttcagcctcccaaagtgctgggatgataggtgtgagccactgtgcctggcttcacttcactcaaatgctcatggtcagccggctgctgtggctgatgcctgttaattccaacactttaggaaaggccaaggtgaccagatctcttgagcccagcagtttgagaccagcatgggcaacatgccaaaaccccatctctacaaaaaatacaaaaatgaaccaggcatgcctgtgctcccagctcctcaggaggccatggtgggatgatcacctgagcctggggaggtggagaactgcagagacgtgattgtgccactgtactccagcctgggtgacaggatgaaatcctgtctttaaaaagaaaaaaaaagtctcacggtccccagggctgctgtcgactctgctcatccctccttccctccctgagtgacagtagccactcatatagcatctgtgcagacccccaggtctctcctgcccacccacacctctcctgagcctaaagctgcacaaccagctgcctcctcctctcagaacacttccataacagaagcccctcaagggagctacgtctgtatccccggctaacttcaggccacccctctcccagccttagccagcagcctgcaggagtgtggccagatctcagcaggctgaggcgaggaggtggaggctaggcagcaggaggagcaactgtacagtgattccagctcacaagcatgggtgcaagaaagcaggaaaagtgctgcagatgggagagtccaagtctagtgaaggtcaagatggaagacgagtgtggagccagaaaaagggactgaagccacagtcaaggggatggggccatgagtgggtagaagcaggaaggaggagcgacatcccacactcacccttcagaaagccacacgtctctccaagctgcctaggctggatgagagctctcttggcccctgattccatgtttggcccaggctagggcccagtgcacattaaataaatgaatgagtagtttcaaagccctgctctgccactcctgcctctacccctgtaaaatggggacatcggtgcctgcctcatagatgctatttcatgaaatgagacaaggaccacatggtattccatctgcctttccatcctgcggagtggtgcagaaggactctgtgctctagaggactcgcactgccttccccatctgctcctgcacctcaggagctttcagctaagccacatgcggccccagtccacagggcatccctacattgccagaagttaggaaccatggtatcccatttcccgggaagactgctcctcctagaaaaatttaaatgtattcccacagggttgcagggtctcctcacgcctatcccgtagaatggcttacatctaaacagatgacttttgtttttgagatggaatttcgctcgttacccaggctggagtgcaggggcgcgacctcggctcaccacaacctccgcctcccgggttcaagcgattctcctgcctcagcctctccagtagctgggattacagacatgcaccaccaatgcccagctaattttgtatttttagtagagatggggtttctccatgttggtcagackggtctcgcactcctgacctcaggtgatctgcccgcctcggcctcccaaagtgctgggattacaggtgtgagccaccacactcagcctacaggtgacttcttaaatcaatactgagattatagtattatgcctcttccaaagcagcctggtgaggacaatctcccactcccaccctaaaaaggaataaagaaaattgcagcatgaacaaaaccagaatggagaatgggccatttcctggagtggtttgagccaagagggagctgctctttgtccgtgcttgtttctctgagggtctcctgggcacagctgataaaccacccaagtttgaaagacacacgttattttattaatatagccatctctccccactgccccagtggtgaaggtgtttgcattgcaacatggaggggcaccaaatgctctgcgggccctagcccgctgccacaggctaggcctgcctgcagccaagaaggctgctcaaactctagatgccatttggaggcatgaggacctgagcccagaggtggcagtgtcctacccagggaagtcaacagatcgtgctccaggtcccagctctgggctgggccaggactaaatcctggctcccctttcttggtactaaggggattagtgcttggttgtctgtagggggtcagagtagggagggttccaggaagggttccagagtgggctcacaggggacctcctcccctggcctcttggagtccaggtcgtcgagggcgcaaagctgcacgccatcctgggcaagctgggcccgcagcgtgggcgcggtgaggacgcgcagctcatgcagccgctcccaagagcaagagaaagygtcggggccttcaccgcagccgccggtgggaggcacactggggtagccggggtgcgccatcagctcggctgtcagggtgtggcccgctagggtaccttccaggacccgcgccagggccccggacacgcggtgagcggacatgtgccggccgcaagtgctcaggcccacgaaggcgtctgtccacctgtggggggcgggacatcagaggtgggmccaggccgggccatggccaagggctaggtaggctagggaagggacggcggggtgggagggggtaactggggtggcggcagcggtcgacgccagactcgcttccgggttgagaaacggacacagctagccaggtgaacagccagtgcggagggacagaggcagctatggtaggagacggggcggggagcctcaccgcaggccgtggcggragaaggggcccacggcggcccgggcgtcgcgctccacggcgcaggcgaaggcacgcgcgggggcctccagccaagtgcagccacccacaccgcgctccagcggcagtcgcgtaaagcgcaccccataggcctgcagcgcctcggcgaacacctggcacacgcctgcgggcggagcgggtcagggaggagcacgtcctttcacctgggggcatcgaacttcccctactcccccagccccgcctgggagtaacgccctccaaactgggatcactaaccacgcacctgggagcacgtgcacgtgctggtgcccgtccgcgtgcgtgggggccctgcccagcagctcccggaagcagcttagttgggcctcgagctcctcccgcacctagagggcgagcgagagacaccttgagcgaccgggagtagctgccgaggataccctcctcgtgcttccgtgtgatggctccagtgtttgaatgcggaagtcatccaccgccagctcctaacggcctcacagtaccctccgggcggagctctgggggtcctcgcgagcatcctcctgtagctgcggctccgcacctgaggcaaatccacgtctccggccgccaccgcctcccggaatcccatcttgccaaggaagaagccttccgggccgagcagcgatgaggcgccacggcgggccggacccacggggcggccctcggacaggttggcgtggaggcccgtggggatgctgtgcctgagggcggagcgcgagctggagcactagcggccgcggagccgcgcgccccaagccgatcgccgccctgctagaggccctcccctcacctgcgggccagctccgccgcgctctccgtggccgcaccgttgaccagcagggacacgctggtcacrgccccggccagaaaggcctccacgataccctcatcgcgtcgcgggcagtaaccaaagtcgtccgcggtgaccaccaggcgcatgcgagggcgggacatggccgcctgggtccaccgctc

SEQ ID NO: 95560 - DNA, 44247 bp, Homo sapiens
tacaaaaacaaacatttgctgacataatcacaatgtcattgttacactttacataattgacaacagttctctgacatcagctggtcatagtcacctctcctagatgggccacagaagtctttctagacttggtttgtcacctcaggacccagtgagactcacacattcattatgtttggctgttaggcctcttaggttccttttaactagggtgattgtataattagtgtctaaattgggaaccttgtgagaatgaaatgaaagggggccatatatgtggccacacaggggcagcaaatgtacactgggatggccctgggtccttggccacttctgttgaagtcccctttgaggagggatagcctgtctggtgtcgtcctctggcaagtcccacttcccgggtttgcgtctgttacggtctgctggtgggttgcttcctcctctgcctgtatttcttggacagttgctctaaagctcgattggattcaggctcagttccttcagtatatttgtgttcgtgggtgcctacactagtgtggggctactcacttctgtgtcacatggagaggcccagcttgcctgggggtcccactttctggagcattgagagtgagccctccactgattgttggaccaacagcacgtgtagccccccaaggtgaggttggtgagatggggcatgttggcccctgtcagcagtggctctaggtattgttcatggtgttctttggggccccctcmctttcctgttggagggactgcgtgaagaccccataccactgtgtctggctcccactctacctgctccagctgcaaggtaggcactcactggcaccttttgttgcagacaccaagaagacgagaaagaagccaagacagaagaaaccagaacccaacctcttgtgggaccggttgacctccccatgcctgccaccaaccctgctgccacctctgccgctaccaccaccatggtctccgtggtgacctcatcaccccctggcacctggggctgccttgcttgcctaaagccaagtaggtggagccccttggtgccttcaacccccacccaacgccttaaccagagcaaaccccgtttatctgctttgtgcatcaagaccctgtctgcaaagaggggtctgctgcttaaaagcagagggctgagatccacggctacaggcccaggagagcccctgggattgttctgagcagggggcacccaggactgcctggagtgggggaggctcccactgaccgacttgcagggcagtggagggaagggaccaaagaccgtaggcatagtgtagaccagacaggatcctggggctcccaaaggacaggtggaaaaccagggggcccctcccacatctccagccccactcctgcctctccctgtgggcatggctccccatgctaccctctgcctgcagtgcactgggttagagccaggatggtgtctggccccagggaggtgcggaggcatgcttaccaggggragccagggcaatggagcttgggcaggctgtttccagccacatatgagaaatggaagcctccagggttgagaaccaagggagtcagatcaaccagtcagatcaaccatgtggctgcaagacagggcagagaggggacgtcagccccaggcccctccacacctcatgtgcagttctacagcacgggcacaggcactgcctacacagagccaacctctgagcccagacccctccactgtaaaatgagaataagcactcaggatggttgtgaggattcactaacagactgagaagaaatggtgacctaggctggcacatgggacactccccaagatgctcctttttcatttccctcaagcccagagtaaaccccttygacctccttgggtttcgtgacaggccattccagtttaatttcacttcagatcttgaaatgtccaaattcttcacctggaggatagaaaggaaatctcaggataagtttgttggcctcatttgaagaaaagtaccttatagaagagccataagaatgacgtggctttcattcactcagcagatacattgggaccatctcttgtgcccaccttgagcttggttaggggtacaggagatggggtcgggggcgctgggaactaaggaggtctgaacccagcctgggggatggaggactgcctggaggtggaggccagacctgaatgagtcacacaggctaagtggggagtcaagaggtgcaggcagttaggccaccacacctggccgctcatctttttcagcattgaataatattccattgcctggatatgccacattttatcattcgcccaatgaaggatatcctggttgcctccaagttttgcaattatgaataaagcagtataaacatctgtgtggaggttttagagtatacataacttttcaactcatttgggtaaataccaaggagcatgcttgctgaatcatagggtacgatagccaaactgtcttccaaaaagactgtaccattttgcatccagcaatgaataagaattcaaaggccttggctgggcacaatggctcatacctataatcccagcactttaggaggctgaggcgggcggatcacgaggtcaagagatggagaccatcctggccaacatggtgaaaccctgtctctactaaaaatacaaaaatcagcrgggcgtggtggctcatgcctgcagtcccagctacttgggaggctgaggcagaagaatcgcttgaacccaggaggcagaggttgcagtgagccaagatcgtgccactgaactccagcctggcgacaaagtgagactctgtctttaaaaaaaaaaaaaaagaattcagaggactttttgtgtaaggaactcacactgttttataaaaagacaattcagaattctggccgagcgtggtggtgcactactgtaatcccagcaatttgggaggagtgaggtgggggatcacttgagctcaggtattcaaattagccaggcatgttggtgcgcacctgtagtcccagctacttgggaggcgtgagtgggagaatctcttgagcccagagggtggaggcaggcacctgtagtcccagctactcgggaggctgaggcaggagaattgcttgaacccgggaggtggagcttgcagtgagccgagatcacgccactgtactccagcctgggcaacagtacgagactccatctcaaaaaaaaaaaagtaataataataataataataaatctttaagttcaccaataacaatagatacaaaatattccatcaaacgggtggaacatcatttactcaactgttcttgctttttgaaatatttctccaatggggtcaatttttaggttattggtgcattttgctttctgactgagtcatcatggtgcatcaccacaaatgggttatttttaattggtttgtatttatttgtttgcttgcttatttagagacagagttgtgctctgttgcccaggctgtagtgcagtggcgcgatctcggcttactgcaacctctgcctcccaggttcaagcgatcaccatgcctcaggcctcctgaggagctgggatcacaggcacatgccaccacgcccagctaatttttgtatttttagtagagacagggcttcaccatgttagccaggctggtctcgaactcctgacctcaggtgatccaaccgccttagcctcccaaagtgctggaattacaggcgtgagccaccgcaccgactgtcccctccccacaccccggcccttttttaaagagacaggatctcactctgttgcccaggctagagtgcagtggcttgatcatagtttactgcagcctcaaactcctgggcctcaagtgatccttccactacagcctcccaagtagctggaatcacaggtgctgccaccatgctgggcctaagattccagcccttaaggagctacatcccatccactgtatgtgtgtcatggaggcagtggttgtgtcagggagggtgctcagtaaaccgggacacagactgaattacacaggattacaaattgtgaggaattgtgacagactttatgggagatgcatggaagtgggtggttagggaaggtctctctggggaggtgacacttatgttaaaacctagagaataagaagccagccatgaaataaggcaaagatagctggctttcggtgactgggtggatggtggtactgctcagcagagtggggactgggagaagagggaggattgaaaattctgctttatggccgggtgcggtgactcatgcatgtaatcccaggactttgggagggctgaggcgggaggatcacctgaggtcgggagttcgagaccagcctgaccaacatggagaaaccccttctctactaaaaatacaaaattagccaggcgtggtggcgcatgcctgtaataatcccagctacctgggagactgaggcaggagaatcgcttgaacctgggaggcggaggttgcagtgagccaagatcacaccattgcactccagcctgggcaacaagagcaaaactccatgtcaaaaaaaaagaaaaaaaaaaagaaaattctactttgaccagacatgttaatttaatttttttaggcagagtcactctgtcacccaggctgggatgcagtggcctaatcttggctcacggcaacctctgcctccccagttcaagctactgtctcggcctcccaagtagctggcattacaggtgtgtgccaccacaccaggctaattttttgtatttttagtagagatggggttttgccatgttggccaggttagtcttgaactcctgacctcaagtgatccgcctgcctcagcctctcaaagtgctgggattggccgggcgtggtggctcacgcctgtaatcccggaactttggaaggccaaggcaggcgaatcaggaggtcaggagatcgagaccatcctggctaacatggtgaaaccccgtctctactaaacacacacacacacacacacacacacacacacacacacaaagtgctgggattacaggcgtgagccaccacgcccatccagacatgttacatttcagatcagtggttacccaagtggagatcaggaacctggagtgctggtgacttagtactgggagtcatgggatacaaatggcatttaaaattaggagcctaggcaagattaccctgggcctgagtgtagctaggggcccaaggtactgatctgacccaagggaagggtctggcagaagagacggaagggatcaggtagggctttggacctctaggcttgatggccacctgctgctgggcctccgaggggcctggaggcggtggggaccgaatatgcagagagaatgagaagtgagcgagtagaacgagagtggtacatggctttgaaggcatctgccacggaggcgggaagggatggggtggaggctcatgagacttgaagctctaggaggacgttgaaaaagacctgagcgctggccgggmgcgaagcctcaggcctgtaatcccagcactttgggaggccaaggcgggaggactgcttgagctcaagagctccagaccagcctgggcaacattgtaagagcctgtctctacaaaaaattaacaaattagccgggtgtggtggtgcgtgcccgtagctactcgggaggctgaggtgggagaatcgcttgagcctgggaggtcgaggcagtagtgagctgtgattgtgccactgcactccaacctgggcgacagagcgagaccctgtctcgaaaataaataaataagacctgagaacccagtatgggaatggccctgagccgtggctaggggggtagacaaggcggtccagacagacccctcaagaagatggggcttcgaggctgagggagctcggccccgaaaagacgcctgcgggagatggcacacctagctaggaccccatactgggcaggcgatccttccgagcatgagcacctggcgctagcgaaccacaattcccagcacgccaggcgcccgtttccggggcgcgccgcggaacccggaagtggtcacggaactcggctgcggctccatggtctgagttgtcagccgttgttttttcgtgctcgctagtcgccgccgccgctccgccatggggaagcgacagcaccaaaaggacaaaatgtaagttgagccgcagtcgggagcggcgctccactctgcctcagtgaaccgcctgtcccgcactgcgcgccgctcgccttccctctcagctactccccagagcacagcccaaaggtcacttcytcccggaagctgccgccctgtctccagtcagggtaatgaccctcgggccgccgcgctctcccggggccgcggctccgatgacgtcagctgcgggctcgagcgcagcccggttttccttactctggttctgcccggaccgtcccccgtctgytcgcgagtttcgcccttgaatgagtagtctctacctcttccgtacttcacgtctcgctgtgttctggttcatgcctatcagcctgcaaacgtgctgcagagccttctaatttaaagcaaaccaggtcgggcgcagtggctcacctgtaatcacagcactttgggaggccgaggcgggcggatcacctgaggtcaggagttcaagaccagcctggctaatacggtgaaaccccgtctctactaaaaatacaaaaattagcggggcgtggtgacgrgcgcctgtaatcctagctatttgggaggctgaggcaggrgaatcgcttgaacccgggaggcggaggttgcggtgagccgagatcgtgtcactgcactccagcctgggcgacagagcgagacgctgtctcaaaaataataaataaaatttaaaaatccacccgtgccccgtgccccacgtcccacgttcccctcccgctgccgccgtgttgtttctcttaagaacaagtgagagactagtggcttcatgctgttttctgagtctcttgaaaccactcaagtcagaatttcgaccccagaactgttgggcttctcaacagtatgtcacaccgttgaccactccctctttctgaagccctcctttggtatctgggatttcacctgctctttgttttctctcgacttcagcggcctctcttttcaggttcccagcgacttcttgttgctaaatctagtattcaatcctcagtcctcatttttttttttttttttttttgagacgcagtttcgctcttgttgcccaagctagagtgcaatggtgagatcttggctcaccgcaacctccgcttcccggcttcaagagattttcctgcctcagcctcccgagtagctgggattacaggcatacgccaccatgcccagctaattttgtatttttagtagagaaggggtttctccatgttggtcaggctggtctcgaactcctgacctcaggtgatccacctgcctcggcctcccaaagtcctgggattacaggcgtgagccaccgcgtctgggcagcctcagtcctcattttgttgggcttctcaacagtatgtcccactgttgaccactccctccttctgaagcccttctttggtatctgggatttcacatgctctttgttttccatcgacttcagcggtctttcttttcccagtctcctttctggaccctcctcccttctctcagatctcatacgtttcttttccataaacattctctgtgggtgatataatttcccagtcatctataagctgctttccccagtcttgtgtarttagtggcttacttaatatctccactggaggactgaaagacatctcaaatttttttttttttttttttttttgagatggagtcttgctctgtcgcccaggctggagtgcaatggtgccgtcttggctcactgcaacctctacttcccacattcaagcaattctcccacctcagcctccccagtagctgggattataggtgcctgccaccatgcccatgctaatttttgtatttttagtagagacaggttttcactatgttggtcaggccggtctcgaactcctgacgtcgagtgatcgacctacctctgcctcccaaagtgctgggattacaggcgtgagccaccgtgccgggccagacatctcgaatttaatatgccttaaacagaactcttgattttcagctcttgagcctgctcctccctgtaaactaaaaataaaaccctaagtccccccactggctaagcagacacccttgtggccaagagaaccccaggaaaaccttaaaactgagttcctggccatgatgggatagagatcagctgtgccttgttatatccccctcccttttgtggcttagacacaacaactgaccagcattaatgttgaaatagagatcataaggggccaggcacggtggctcacacctgtaatcccagcactttgggaggctgaggcgggtggatcaccaggtcaggagatcgagaccatcctggctaacacggtgaaaccccatctctactaaaaatacacaaaaaaatcagctgggcgtggtggcaggcgcctgtagtmccagctactcgggaggctgaggcaggagaatggcgtgaactcacgaggtggagcttgcagtgagccgacattgcacaactgcactccagcctgggcagcgagcaagactccgtctcaaaaaaaaataaataaaataaataaaaataaagaaatagaaatcataagattgacaaaacagactctttgtggcaataagataccatttttttttttttttgagacggagtctcgctctgtcgcccaggctggagtgcggtggcatggtctccgctcactgcaagctccgcctcccgggttcaygccattctcctgcctcagcctcccgagtagctgggactacaggcgcctgccaccacgcccggctaattttttgtattttcagtagagacggggtttcactgtgttagccaggatggtctccatctcctgacctggtgatccgcccgcctcggcctcccaaaatgctgggattacaggtgtgagccaccgtgcctggccctctatttttttttttttttagtagagackggtttcaccgtgttagccagaatggtctccatctcctgacctcgtgatctgcccgccttggcctcccaaagtgctgggattataggcgtgagccaccttgcccggccggttttttttgttttttgttttgtttgtttttgagacagagtctcccccgtcccccaggctggagtgtagtggtgctgtcacagctcactgcagcctcaacctgccttcctgccttagtctttggagtagctgggaccacaggtgtgagctgtcacacctggctaagttttaaattttcttgtagagacagattctcgctttgttgccccagctgttctccaacgcctggactcaagcaatcttcctgccttggcctcccaaactgttgggattataggtgtgagccactgtgcctggtctccatgtctgttgtgtttatcactgtgtggctgacatatagtaggtgtttttttgtttgtttgtttttttgagacagagtctcactctgtcacccaggctggagtacagtggtgtgatcttggctgactgcaacctccgcctcccgggatcaagcaattctctgcttcagcctcccgagtagctgggattacaggcacccaccaccatgcccagctaatttttgtatttttagtagagacgtggtttcaccatgttggccaggcttgtcttaaacttctgacctctagtgattcgcctgcctcgggctcccaaagtgttgggattacaggcgttagccaccgtgcccgccccatagtaggtatttagtaagcatttgctgagtaagcaaagattactcacttccaaagacttygtcctctttataaaggtggtggtggtagcattatcttcctctcttcttcaggtacattacctgtgctgaatacactcacttttatggtggcaagaagccaggtaaggcatgcagtctttctgttccccgttgggggagtggtattaaggaactgtgtcttcaggatacagtgagctgtaaaaatagacaacaagaacacggaaactatggtagacgaatgggctgaggacacagttcatgaaagagaaatatactcaagatagaagaacctgcttcatcttagtggtgatttttgtaaaatgtaatttaaaatattccccgatgctgggagctaagtaaaaaataaataagtaaatraaatacaaaattacatgtacatttaaatgttttttctctatcaagtttataaggaataaaaagaatgataatattttcagctgtcaaaactatcaagactacaataacaagagcactgtcataattttaatggaagtaaaaagtatgcacttttcccagtaagttcttttttgatgtaccccaagtgttttggtttatctgttaaaaggtttttaatccacagcaattgctgtacttaaaaatttgcatgaactttttcataagctgtaactgaattgctagcaggtgcacatagatgaaatactttacagagtaagatttctgttttttatttcatttttaaacagatctcccacaaacaaattttcgtcgtttaccttttgaccactgcaggtaagagttttgcgagtttacctttcccttgtaattgttctctgatcctgtctgatagtgaatctgccccttgtggatgtggggttatgcgtaaaagtgtgccttgaagatgtggcccttcagttcatgttgggagaagatgcagagtcctcgtcatgatgttaggagcttgccttggtgttggatcctgctctagaccttcaccaggggtggcacaaacactattgtagttggaggagaaggttggtgagagagggaggtggccaggctgcccagagagggctccctgggacagcatttcaggaggtcaccatgccagtctcagccagcccacatcctgaccagggtgcgtggcaactcaccaggaatgactgtcctttttcagtctctctctgcagccctttgtctacccagtctgcactcccgatggcatcgtctttgacttactgtgagtttttccttgaattttgatctaacaaatgtgagattctcaacacccattaaggaaggggacccttggtacccttgggtagggctcttgggcacacagaagtaacagctrgggccttggggacrtggcagcaatgctgctgtgacccttgggcaggcagctctagttgtcaggtactgctgtcactgcctggaatggggtagaccaccccctacccctccaagtgcaggcatgagccactgcacctggcctgaaaatgaatttttaggaaatttcagccttattttagaaaaagaaaattttaccacagtcccactayccaagataaccactgtaaatatgctaattttttgtgaacttatttgtagtaacatgattgagataacactgtgaacactgtgaagtgttgacaggtaacactctgtggatctatttattcacttggttgtgatgagagcttttttccccgtgtgattcagaattctctgaaagtatagtttttctttgttcttttcttttttttttatttgagacagggtctcactatgttgcccaggctggtcttgaactcctgcgctgaagcagtccttccacctcagcctcctgagtagctgmgatttcaggcacacaccatcaccatgcctggcttgaaagtatagtttttgatgctagcttagtatttaattatacagatgtatcaacatttatgacggagtggtggcttatgtctgtagtcccagcactttgggaggctgaggcaggaggatctcttgaacccaggagtttgagaccagcctgggcaacatggtgagaacctgtgtctacaaaaaagtgcaaaaattagccagccatggtggtgtgcacctgtagtcccagctacttggaagctgaggtgggaggatcgcttgagcccaggggttggaggctgcagtgagccatgactgaaacactgcactccagcctgagtgacaaggcgaaaccttgtctcaaagaaaaaaaacccaaaccatttacttactcattttcacctgtagtttttgttgtttatacataactacagtaataactctgaacatattttgaaacctatgtatccacaaatatcccccaacttcctgagacaagatgaggagctcttcctctcctaaagtgaagcaagaccccttcacaggcctctaacctggaagcagccctgcaagaccacagtgttgttaccaggtggcgcctaagcaccctggtgatgctttctgttctgtcttcccttcaggaacattgttccatggcttaagaagtacgggaccaaccccagcaatggagaggtaggtggctgtgcaggagtttcagtgatgctagtgaatgctatcctctcacttctcctwttgttctgrtggttttcatgaacacaggaacatgggagagaacygttcatggggcccagtgaggagggacagtcttcccctcctctccccacacccattcttttccagaaatgcttccggcctgtgcacgtgtatatatgtgcatgtcttttcttgggccatagctgtgacctcgtcttaacttgattctatctgcaaagaccctatataaacctttgattatatccaagtcaggccacattcacaggttcccagtgagcatcagttttgtggggacattatgcagcctggttccgagggagatctagtgtattttaccagtgaccttgcccttcctgttggaattacttgcatgtattcctccacctctttcctatggcctggggcaagagctcaaactgtgcgagacggagggtcgggactccggtgggctccctgtgctggagccgctgggagggagctccctggacaatatgaccctccctaccgggccagcaggagaagctggcagcccatctgtctcagctcttctggcccttgtggtgttctgggggctgcagggttctggggactctttgtagatggagttggtgctcctccaaggcttccctgctctcyagtacaaggggaacttggccagggggctggtttttgagtgttcttggaccagcgactaaagcccgtggcttttctctttcaaatgcttgggtagggggcttgtggcctcacctccttagggagggcactcttcttccttggtctttgtcacttgaagactgtttctgtgatgtctgctgctgggagccacattggatcccaggggcttcccccaaggtcygtgccccagtctgggaagtcattctctgttgctcttctcagcagaggtycctgctgcctgcctgtgccctgtgtggctgggtgtcggcctcagggagcagcctggtggcaaggtgggggtaggtggggttttcctgtccacrgctgccctcatggcccctgctgtcccagtggattctgtcatttggttgcagctgggatgcattttgctactttgggtgttttgcttcacaggtactctttggggttcccaaacttgtcgattgtgctggcccccacacccacaaagtctgatctggcagttagccacgctgttagggcttacatcagggaggtgtggccatttctttgttccaggcatcatgttggggtgagtctgcaggagcgccctacacgtctttatcctgtgcctgcgcctctcccttggcctgctctggaagggaccttgctgtgtgcttgcttggccagacctatgggtgtcagcagagccttgctagccaaacctctgaggagagttcctgggccaagggctggctggcccatgtgacttttggggkctcaggaggagcctgttgtgttggggagtctctctgctcaggtcctgtgtctgaatagggaccctgctggccctctggtggtctcctccacacctgtagtgatgtagggaggtgggggtagttgaatgacaaaggaaggaacgaaggtggttagaggagcagatgcggtcagttgggttggccagcagcaggcagggcccacggaggrcggggagggcagcttaaggacctgctgccagcttagggcccagccccaggaggctcccgctgtgtctcccctgggcctgggtaggcatagctgggcccagcccacaccaggtggcagcagctgctggattgtggccctgagtgaggtgctccccagcagcacatagctctgcctcccttccagggtctccccacagccccgcccccagcagttcccacctccggttgtccagactttgttttatgggaaagtttgctgtggaagagctgtactgcagacacaccacagaaactgaaaacattacctgccacctggggtaggggaaataagaaaaaagaaaaaacatccagaaacagaaaaatagagtcccatcttcccaacacaaccattcttagcattggrgtgtatttcttactttctccccacttttaatgttttgtttttcttaaatattcatatgacagagcactttgggaggctcaggtgggcagatcatgaggtcaggagattagcctggtgtggtggcgtgtgtctgtagtcctagctactcgggaggctgaggcaggagaatcacttgaactagggagtgggaggttgcagtgagctgagatgttgccgctgyactccagcctggtgacagagagggactctgtgtgtcccaccactctagctgaagaaatatgttcactttttaattttagaagtaatctgtgctcaccataaagacgtccaaaccctgcagaagtataacacacaccaccctgtggcctggtcctcctgctcggggtcacccgtgacggctcttctcagagcgtggtgggggtgccacataaacacaactgcccgacgccatcctgcagcccccgtgaggtccttgcagggtcttggggccttcccttttgtccagagctgcacagggttggcctagtcagagacttttcctgcctgtctctgaccctagcatctctgtgcatcagttacttattcattatcattaattattaactgtgcttcttccagaagctggacgggaggtccctgatcaagctgaacttttccaagaacagtgagggtgagtggaactatcacagccaattctgggcttgacctgcagacccaagggcccagctctcaccagttttcatacggaatcagtcattgctttctgaccaagctagacacctgcttttaattccgcaaaaagtgtcacagggctgggcacggtggctcacacctgtaaacccagcagtttgggaggccgaggcggatggttcacgaggtcaagagattgagaccatcctggccaacatggtaaaaccccgtttctactaaaaatacaaaaattagccgggcatggtggcgggcgcctgtagtcccagctactcgggaggctgaggcaggagaatcacttgaacccaggaggcagaggttgcagtgagccaagatggtgccactgcactccagcctggcaacagagcgagactctgtctcaaaaaaaaaaggtgtcacaagatttcttctcaaaggtctgggtagttttaaggtgggggaggttgggggcagaacctgtggtgttgggaacttcccacaaaggcgatcaggccattgtaagctgctagtggcctttgtgggcacagttggatctgcagggcatgggccccctctggctgaggctgtggtctgtttgttgttggaggcagaagttgctcatgctgggaaccaaggcggcagctgagtaggggatgtgggtggtctggagggatttgtccagtagctcttgggctaggcttttctttgccacagctcatagagcccagcccagtgctgcggctcctgcttcatgcccattacacaccttccgctgttcttgtggccagaggcccggatgagttgtgcagcccacccctgcccaggtggtgatcttgtgctaggttctagyccaggtcttttgcctgtggagatgctatggcttaggggttgtccttgcttactgggtgcatgcattccagggagatgctgtagcacctgaggccaaggcccttttgccccgcttgtctgagcccagagcccggtccccagtcggtgcagcattcgcaggtgaatgaatgggtgaacctcagcacgtcattgacgtcggtggaggacacggcgctccaccctggtggccgagggtgggctgcctcccctcctgtgatcagcagtgtgtgtgtgtgtgtgtgtgtgtgtgtgtgtgtgtctcattcagcaaatatttatttatttattttgtktgtgtgtgtgtgtgtgtgtgtgtgtgtgtgttattgtttattttttatttctccaaacctctttttttttttattgatcattcttgggtgtttctcacagagggggatttggcagggtcataggacaatagtggagggaagatcagcagataaacaagtgaacagaggtctctggttttcctaggcagaggaccctgcggccttctgcagtgtttgtgtccctgggtacttgagattagggagtggtgatgactcttaackagcatgctgccttcaagcatctgtttaacaaagcacatcttgcaccgcccttaatccatttaaccctgagtgaacaccgcacatgtttcagagagcacagggttgggggtaaggtcatagatcaacagcatcccaaggcagaatttttcttagtacagaacaaaatggagtctcctatgtctacttgtttctacacagacacagcaacaatctgatttctgtatcttttccccacatttcccccttttctattcgacaaaaccaccatcgtcatcatggcctgttctcaatgagctgttgggtacacctcccagatggggtggcagccgggcagaggggctcctcacttcccagaaggggcggccgggcagaggcgcccctacctcccggacggggcggcggccaggcgggggctgccccccacctccctcttggacggggcggctggccgggcgggggctgccccccacctccctcccggacggggcggctgccgggcggagacgctcctcacttcctagacagggcggctgccgggcagaggggctcctcgcttctcagacggggcggctgcmgggcggaggggctcctcacttctcagacggggcggccrggcagagacactcytcacctcccagatggggttgcagccaggcagaggcgctcctcacatcccagacgatgggtggctgggcagagacgctcctcacatcccagacagggtggcggccgggcagaggctgcaatctcggcactttgggaggccaaggcaggcggctgggaggtggaggttgtagctagccgagatcacgccactgcactccagcctgggcaacattgagcactgagtgaacgagactccgtctgcaatcccggcacctcgggaggccgaggctggcaggtcactcgcggttaggagctggagaccagcctggccaacacagcgaaaccccgtctccacccaaaaaatacgaaaaccagtcaggcgtggcggcgcgcgcctgcaatcccaggcactcggcaggctgaggcaggagaatcacgcagggaggttgcagtgagccgagatggcagcagtacagtccagctttggctcggcatcagagggagaccctggggagcgggagcgggagagggagagggagggacagcaaatatttattgagtgcctgccatgtgcagagagcacaacaggctgtgtctctcctgaatgagaggagcatgcattctggtgggggagaacaccagagagcagctcagcagggtgtgccagaggctgcttgtgtgtgkagagcacagcagggggaggggagagggccgccctgacccgctgcagggagggagagcygtgtgggcatcgggggagtgcagggccaggctgatggcacagccagtgcaaagaccctgaggtgggcgcacgctcaagggtgtctgtgcccagctgggagtccaatgtggctggaacagcgtgtgctagcggtggaagcaggggatgtggtgacagaggtcaggggtggggatggtgtgcagagcagtcctgtggggcctgggagccacaggaggacttgggcttccgctccaagatgagagccactgagggaggaatgaggtccagcctttttttttcttttaaaactttgacctggcagtcagcttcttttgttgtgtttccttttttcttttgaaatgaggtctctgtcacccaggctggaatgcagtggcacagtctcagctcactgcaacctctgcctcctgggctcaagagatcctcccacctcagcctcccaagtagctgggactacaggcaccaccactgcacccagctagtttttgtgttttttgtagagacggggtttcaccatgttggccaggctggtctcgaactcctgggctcaagtgatccacctgcctcagcctccyaaagtgctgggattacaggcgtgagccactgcgccccacctgtttctttgttaattggaattccccgtgcgtgaaagtggagtgaggaggtgtgatacgcctcccytgtgcccatcaycaactccagcccctgctgtctcccatctgtgcagttctgtctttgctcccaccagtacccccttgcatgatgctgaagccccaatttaaaaaayagttttcacatcagaaggatttttgtttgtttgtttgtttttgagacatggtcttgccctgttgcccaggctggagtgtagtggcatgatcagagcgcactgttgcttcgaccttccaggaccaagtgctccttccacctcagtctcccaagtagatgggaccacaggcatgtactaccatgcccagccaattttttttttttttttttttgagatggagtttcgctcttgttccccaggctggagtgcaatggcgtgatctcggctcactgcaacctccgcctcttgggttcaagcgattctcctggctcagcctcccgagtggctgggattacaggcatgtgccaccacacctggctaattttgtatttttagtagagacggggtttctccatgttggtcaggctggtctcaaactcccgacctcaggtgatcctcccgcctctgcctccgaaagtgctgggattacaggtgtgagccaccgcgcccagccccarctacttttttaatttttatttttgtagagatgaggtttccctatgtcacccaggctggtcttgaagtcctgggctcaagtgatcctcccgcgtcagcatccccycaccaaaaaaaaacagctgggcaccatggtttaygcctgcaatctcagcactttgggaggccaaggtgggaggattgcttgagcccaggagttcaagaccagcctgggcaacataatgaaaccttgtctctacaaaatgaaacctaaaaattagccagtgtggttgagcacacctgtagtcccagctacttgggaggctgaggtgggaggattattggagcttgggaagttgagactgcgtgagctgtgattgcgccactgcattccagcctgggtgatagagctagaccctgtctcaaaaaacaaaacaaaacaaaaaaacggggtctcagcctatcgcctaggctggtctcaaactcctgacctcaagcaatcctcccaccttggcctcccaaagcactgggactagaggtgtgagccacctctaacttgaggctctaactaatttgaggctctaacttggcctcaaatcaggattttttttaagaaaaagtccccacaaggccaggtgcggtggctcacgcctgtaatcccagcactttgggaggccaaggtgggcrgatcacgagatcaggagatcgagaccatcctggctaacacggtgaaaccccgtctctactaaaaaaatacaaaaaattagccgggcatggtggcgggcgcctgtaggtcccagctactcaggaggctgaggcaggagaatggcgtgaacccgggaggcggagcttgcagtgagccgaggagatcatgccactgcactgcagcctgggcaacggcaagactctgtctcaaaaaaaaaaaaaaagaaaaagtccccacaaatacatgtggttgatgtttctgagtccccctactgcacttacttttttatccccagaagtgggcactttgacagggcccctggccactgggtggggacttacaggcagagagacagtaaccaaggccaggtgcagtggctcatgcctrtaatgccagcrctttgagaggctgaggcaggcagatgacttgaggtcaggagttcgggaccagtctggccaaggtggtgaaacactgtctctactaaaaatacaaaaattagtcgtacatggtgacgcaygcatgcctgtagtctyagctactccggaggcggaggcagcagaatcgctggaacccaggagatggaggttgcagtgagcygagatcacgctactgcacctcagcctgggtgacagagcaagactccatctcaaaacagagtaaaacaaggccgggtgcagtggctcacacctgtaatcccagcactttgggaggccgaggtgggcagatcattaggtcaggagatcgagaccatcctggctaacatggtgaaaccccatctctactaaaaatacagaaaaattagccgggcatgatggcaggcacctgtagtcccagctactcgggaggctgaggcaggagaatggcgtgaacctgggaggcggagcttgcagtgagccgagattgtgccactgcactccagcctgggtgacagagcgagactccatctcaaaaaaaaaaaaaaaaaaaaaaaacagagcaaaacaaaaaaaagacagtaggcaggcaaggggatgggcggttctgaaggaagagctgaccagggggctggcggaggatgtgggtgagaggaggtagagctgtcagggctggaacatgggttgtttcctgccgagggccaacttcagtaggaggaggaggctagcatggtgatcacccaggggtgggctggaggatctgaggaagacgatgccgggattgggtcttgcaggatgaataggagtttcctaacggtgtggaagggcttgagggggtgagcagctgtccccatggttccctgctctggcagctgacatggggttccacctcctcccatcgctgactttggagttctgtcctgccctggccctctgcggtcctcactgggatgttcacagcccacagaggtgactggcctccctgtgtgtgccttctctctagggaagtaccactgcccagtgctgtttaccgtgttcaccaacaacacccacatcgtggctgtgaggacgaccggcaaygtctacgcctatgaggtgtgtcctcgctccggggcgtggagacagcggtggggagatctctgctgtgtgttcctagtatacactggctgggctgtgtgctacgtgtacggcctgtcctcgtggggtttacagtcacagccacaggcatggtcatctagcaaagctctggcagtgcagcctccccattttcaggcaggtcaaaaaaagggttgggggaggtgcatccttcggaatccaggcagtcctggctgcccagcagggacccttaaaccccaagaggtccttcygcgtcttcagcaaagcccaggtgctgggaaggcacccatgttttgaggacaggcctctagggctgtgaggggagtgctcgccccggatctggatggagtcacttgcccccaggagggagctgtcccctggaggagttctggcagggagtgggtgtagggagaggggagacagccgtgttcacacatgggtcctcctcttgggtgaggcggggcaggccccacatggcgggaaagccgacctttgcgccrttgtcaatcctgcacctggacgtttgtggggtgtaggtggccagcgctgctccaggggccttgggagccacttcttgccagaagcctgcacaaactggcatggtcagtcctcgttagtggagtgagggctctgctagaccgcaccgcaggagtgcaggcatcttgtgtgcacagcccctgcccacgggggcctggcaccatacctgtgcatgggaggagcttggcaaagcctgcagcgagtgggtgggtgactcgctgagtctttttgctgatcaatgtgcagacaagagcttcctgcaggaaggttgctgygagggtgaactggctcatcgtctgaggcccagccagctccgcctctgtgggagccactgctttcagccagtggggtgtacactgctgtctctctcattcctcatgcctctcaaatcgtgccatggtcrgggccagctccaggcctccctgcttgcagtcccctgtgccaaggcttggggcaggcatcgtaaaaccacttcctcctggctataggcagtggaacagctaaatatcaaggccaagaacttccgggacctgctgaccgacgagcccttctcccggcaggacatcatcaccctccaggtgagtgtcccctgccygcctgccccagctgccttcagcacctgcagccagcccaggcctctacagggccctacccccacgtcagggcccctcatatctgtcctcaaagccacctgaggcatctgaatagccactctgcaggcctggctctgcttcagcgcctcgagggcaggagctggcatgagctctgcaaagaccctgtatctggcacagggtccctgcaggtgtcagagaaccccaagtgaattaatgaaaaacactgacttagaaaagcaggtgctggctggagcgtggcctgctgagtcaatcacctctgtggcttgtcccattctaaccagaggtcggcccacggctgcccacgttccggtccgayagctccctaacagcaatgaatgctcgttagccatrtgcctggaggaaggtcacagctcagccagcagctagcgaggctgcgtccccgtccctgcccctgcccctgtttgctgccctgcctggggcagaccacctcctccctcatgccctgcttgactcccccaacctcagtgtagccctggcctcttccacacctctgacagctggccgtcctttgctgcatgtggctgccatttggccgtaggctgggttcactctgctgggcattctctttttgccacaggaccccaccaatttggacaagttcaatgtctctaacttctatcatgtgaagaataacatgaaaataatagacccaggtatgtacacctaggggctgggctaggcgagggggcttttggatgaaattgggacagtgctccctgggtaaagcccccgctttcctggaggtcagggggtcccagcccagacaggccctgcattttctgaactagtgttcagagaatctgagccaactgcagcctcagaaacaatgggcgggatagacttgctgccctgccagcacacctgctcaggttcccctgctccctgcagactggccggtgctgtcagtgggcaggtggtggggtgatggggtcctcctgtttccctggcctctggtggctgtyctgcagccttggaggagccagcaggactcatgttcagaggtcactcggccttgtgctgcagagcagtggcctgggcactttgtgagcattgtttgaacgggttttaggtaggctgagcacgtgaactggggaagatttgagtcaggagagcctgaggtcagggttggggctgggccgtgtctgtgctctctgcacagggatgccggcccctctccacagggtgggctgctgtccaaggcccagtaggcagcaggcaccctcctgagtcggcaagaatgggtgatttcacatctggaaagacccccaaacacttctattattttaaataaaaataacctttaaaattacagaagcaaagcaactgggtgtggtggcttatgcctgtaaccccagcactttgggaggccaaggcaggcggattgcttgagctcaagagttcgagaccagcctgggcaacatggggacaccctgtctctacaaaaaatagaaaaattagctgggtgtagttggtgcgcctgtagccccagctacttggggggctgaggcaggagaatcgattgagcccaggaggtggaggctacagtgagctgagatcttgcaaccgctttctagctggggcgacagagctagaccctgtctcaaaaggctgggcgcggtgggtcacgcctgtaatcccagcactttgggaggctgaggcaggcggatcacgaggttacaagattgtaacacaaaaaaattagccgggcgtggtggcgggcgcctgtagtcccagctactcaggaggctgaggcaggagaatggcgtgaacctgggaggcagaacttgcagtgagccgagattgcaccactgcactccagcctggacgatagagcgagactccatctccacaaaaaaaaaaaaaaaaaaaaagaaaaaaaaagcaragcgtatactctaaaaagattagaatatacagataaatataaaatatacaaatcaacctgaagtccatcctgagacccttgtgaactgcctggggagaccttcaggcctgtagcggggcactgtggcattctgtggctggcagtggcacggtgcctgcgccatggctggacggccctgggctattctagatctgtgtccccagcacgtgtgtggggaggctactgggggctcggcggctcagggccatgctactgttttgtagatgaagagaaggccaaacaggacccgtcttattatctgaaaaatacaaatgccgagacccgagagaccctgcaggagctctacaaggagttcaaaggggacgagattctggcagccaccatgaaggccccggagaagaagaaagtggacaagctgaaygctgtgagtggcggagggcactcggccaagcccaagccccgtcttcctgcccatctcatggcctcttggagtggtcctgggaaaggggctcatgggggcctgggatacacggcagggaggcagccaggatcccccagagctgtggtgcccctgatggctctgagtgcacagccctggggctgccctgaggcagatagaatctgagaaggcagaaggggaggggctgatgtccacactggtcgttgaagaaccaaggggtgtgtgggggcatgtaggggagatccctgccacagaaggtctgccttgtgctgtggtcccagcctgagctcagtagccagggcaggcacgttgagcgggcacatgtggttctgtggtggctgggagggcagggcccgatgtgcactggggcccaaagccatgccagggagagttggggcgtttcatggtctgctgcggtgctgasgtggatggcatgcctgggactgcacggtgccacctgtctggggctgtcgtgtttgcttcttcctcctgtcaggcagagcatggggatctggagctagggggagggcagagacatgggcaggtagctctgaagttctccttcttaaagaattattcaaattctggaaaatttgaaaaagaaagcttgttgtccagtgtgtcmctccgtctaacacactgcccttagcactttgatatattacttttttttttcttttggaaacaggatcttgctatgttgtctaagctggtcttgaattcctggcttcaagtgagagcctcctgccttggcctccgaaagtgctggaattacaggtgtgagccactgtgcctggcttgtattttcttctgatgggagaaacccctttttcttcctctatgataaaaaataacatttattggggcttttccccgacccctgattaaatatgtaatgtgtttagtgtagaaagtttgaaacttttaaaaagaaatgaggccaggcgtggtggctcacacctgtaatcccagcattttgggaggctgaggcaggaggattgcttgaggccaggagatcaagactaggttagacaacatagtgagaccttatctctacaaaaaatcagccaggcgtggtggcatgcgcctgtcrtcccagctactcaggaggctgaggtcggagggtcacttgagcccaggagttggaggctgcagtgcaccaggatcacacrccactgcactccagcctgggtacagagcaagaccttgtctcataaaaaaattaaaataaaaataaatgagaagtcagccatacactcctaaccctgaggtggccagtcctgtgtggtattttatctccagggtttcacctgatatcataagagtcgggatccagtggaggccaggggaccctggcttggcctagccttggcttcttcctcctgctggttggggaggccctcctggaggagaggcaccaagcagggcctggggggcaggggtggcgtgtggttggcttctaggcaagcgacacrtccccacccaactgcctcccatggcactgctgaggtgccaccctggtttccttggcaggcccactattccacagggaaggtcagcgcttccttcacctccaccgcgatggtcccggagaccacacatgaagcaggtagccaccttggcctctgtagccacctgccatgtgacccaaaagtggcagggggtgggtgtgctccccgactcccactttattggtctgtcaggggctcccactgtcacctgagcccctagtcctccccctcttagctgctgaacccctgccagccccatgaggctggggtgagcctgtgcgtggcctaagcagaccctcggcctccagctcccctgctctccccagagctggagcctagtccccgcctgtgtgtctgaggtcggtgctgcctggcatggtggggctgccccagggtgagggcaggggctgagctgggaccttggcttgtagctgccatcgacgaggatgtgctgcgctaccagtttgtgaagaagaagggctacgtgcggctgcacaccaacaagggcgacctcaacctggagctgcactgcgacctggtgggtgtggaggccagccactccccatgccccaaggtcatctctgggtcatctgacagccatgtcttaaatataggrctgccactggtatgtgcttgttgtaggaaattcagcctgtcactaggcgggacccgcagcagtgccctgtgtycttcctagggggccgcgttggcagcatggcctgcgcacaggtgccagtgtctcagagaaggggccaagccgcacctgctgctctgcccacacttctcccatgcgctgtactctgggccgtgcggctgcacgggtcctgttgcttaatgttgtgggtccatccktgcccagtgtggctgggcagctgactctgctacatgttaaagaccagcctggccaacatggggaaacccgtctctactaaaactacaaaaattagccaggcatggtggcgcatgcctgtagtcctggctactcgggaggctgaggcaggagaatgtcttgaacctaggaggcggaggttgcagtgagccaagatcgcgccacagcactccagcctgggcaacagcaagactccacctcaaaaaaaaaaaaaaaaaaaaagcctcctgtggctgtggtgagctgcctttggcagctctctgcttcatacaagtattggggctatgttgcagacaccaaaaacctgcgaaaacttcatcaggctttgcaagaagcattattacgatggcaccatcttccacagatccatccggaactttgtggtgagtgacgagagtcactggctgcacagatgagcttggtgggacatcgggggctggktgggcttgtccctgccccatcccagggccctggcccatcccacggtggccaggatgagtccagttggtgatcctctgttggggaacccatagactgacccttgaggccccagcccatccagaactgggttcacaaagggaggtggctgggagggcccctcattatcaccaagagcccagcccctgtgtggagccatctggcaggaggggtgtccttcagtcaggcaggcggtgggcctygggtctcagagtgtgacttgctcactggcttttgttttcacagatccaagggggcgaccccacaggcacaggcacgggtaggtactggtgctgggcccctctctgggcactttggctgctcygtggggcatgagggggtagctgggcaggggttgtgcacagctcagacatggaatctgctagaccagggtggaacgactggcagccatcagtgctgtgccccctcaggcctggccctcagttttctcatttccaggtggctgtgaggcctgcatggtagaggaggcaagagtgtgtggtctcttccctgggcccctggggtctgcctcagactgaggccagccctccctcctgcagcctmtccaagcccctcagcctggcagctgcttgggtccagatcccccaacctctgtattcccatagcttgagtgatgatgatggtggccttgactctttaatccctgtcccggggcaggccccaggcggggctggggtgagtgggcagcagcctgcctgtttggaggcgtgggggctccaagggacccaggagttggtggcgtggggctgggagcctccctatcaagtgcccctgccccaggytgggctcagcaaggccctgatgcccctcgggactctgaggtttctagttctgcctcggctggggcccaggctttcctgctyccatgggcctttctcttccaggtggggagtcatactgggggaagcccttcaaagacgagttccggcccaacctctcgcacacgggccgcggcatcctcagcatggccaactccgggcccaacagcaacaggtctcaattgtgagtcagctgggcttgctggggtggcctgggaggtgagccggcactctctgcgggttcttcctcttggccctctctgaagggtgtgctggttctgaatcatacccagacggtgtacggcacacctaggccaagcatgtgcacctgcgttcaaaagggggtccccagagtgagtcagcagggagagctgcccgcaccgggtgtgtcctcgagagaccagaagtcgggaattactggaggtccagaagggcttcttgacagggaccaggcattcgtgtgggtgcctgtggccaggcagtgctgggggaggtcagcgtgtgggaggggttgtgcagggcacaggctgcacagggagaggcgcctggagagacacaggaggtctggccctggtgcatgtggggagcagtgtgcagtctggtggcaggaggcaggggatggggggccagcagggccatgcrcacaggggccggatgcctgtattgtggaagaacagaggtgccctttccatccccagacagtggcctgatgttatgtttcagtctttcaatcgttttcttcacatgggtcctgtgacttccgggataaagcaacctcttaaggattttttatagtttatgatacttttgtaaatggacttttttttycccaacttttggggatcattgctcatgtagagaaaaactaccgttcattttatatctagccactttaacaaattatcttataattcaaaagtttttaagatttttttgggttttctagatagtcacgcttatcaccaaaagctggtctgctctctgcttccctggtgtgcacatcagtcacgtcaccgtcacgtcaccgtgggcctgatgggggaggaggatgtgggcatcttgctgtgctccacagaaatcgctgttttgccttctcagaacatttgttgttgggctgtttttaggagggtggctgactttttagaggtttctttgttagcatctactatgatgattctgtcctttttctggtcctcccgggatttgtggatgtggccactacaaggccagagtggatgggtgtctccgtggcattctggggtgaaccctggcctgtcgtggcttcgccgtggccttctgccagctcactgtcacacgtggtctcggttgtgtggactggctccagcaggttttgctgtgacaggtgtggcccctgcatgttacgagcagggctggctgtggctttgtggcctggaatggttaaaatcacagrgatggccaggcgtggtggctcacacctgtaatcccagcactttgggaggctgaggtaggtggattgcctgagcccaggaattcgagagcagcctgggcaacatggcaaaacccgatctctacaaaaaataaaaaaaattagcggggcatggtggcgtgcgcctgtagtcccagctgcttgggagggtgaggtggggggataatctgagcctgggaagtcaaagctgcagtgagctaggatcgcgccactgcactctatcctgggcagcagtgagaccctgtctggraaaaaaaaaaaaaatcaaacgagtcagctgtgcttaacagctgggcaaaggcagctggcagctattcgtgccacttccttggggctttcatttcagggttaacgggcacttgtttccatgaaggctggtattctcttggcctcgctgtgctgacctttttttctcatgcctaatcacactttccattcctcagtcccttagtggtctttgaagggtttgtctgttttcacttcactttgaagggtttgtaattgttttcagtttctgtctttgcttcttcatggtgcttttcctccttcctcactttaatccatgtgtgtttctgatagccacgtctgtcattttgaggrtgcaygttccctcttcactgcttgctggttgttggtagcttccctttcaatttcttctcagccaaggattgcctaggactgttggttattttcaagtaggttgggtgcgtggtttgtttttgttgtttggcaggggccagggcagggaatcattttattattttttatttctctttggcttaaccagcctgtgaaactgctgacagatcagttgccaccttctctttttttttttttttttttttttgagatggagtttcactcttgtcacccaggccggagtgcaatggcgggatctcggctcactgcaacctctgcctcctgggttcaagcggttctcctgggattacagacgcccaccaccacaccaggataattttttgtactttagtagagacagggtttcaccatgttggccaggctggtctccaactcctgacctcaggtgatccacccacctcagcctcccaaagtgcygagattacaggcatgagccaccacactcggccttcttttcttatttctagtagtattttgtgctttcttggacaactgttgccaaaggtttgcctattttacygtattcaaagatcattagactttaatttgttacagctttgttttcccttttgtgattcttgtaattaaagattttccaggaggaggccaggcgcggtggctcatgcctataatcccagcactttgggaggccgaggcaggcggatcacgaggtcaggagatcgagaccatcctcgctaacacggtgaaaccccatctctactaaaaatacagaaaactagccgggcatggtggcaggcgcctgtagtcccagctactcaggaggctgaggcaggagaatggcgtgaacccaggaggcagagcttgcattgagccgagatcgcgccactgcactccagccctccagcctgggtgacagagcgagactccgtctccaaaaaaaaaaaaagattttctaggaggagcttgcctcaggatggttcttttactttcctcttatctgagtttaattctgcttctagtttccttcactgtgttagaaatcagcaagagagggaactgcttgcaggtcagagctcaggtctgcaccgttgcagatgtcacatctgcggacacttgtctggtggcctcgggtgtggtcagacttggtgggctcaggagcgtgtccctgcgtggctggggggtgcatgtttgatgcagtggaggttaagtcctgtgtctcaccagccgggttgtgggctgtgcctgcctgcaccaccctggggagtgctccgtgycgccagcgccgggacccaccccatgtcttccatcgttttcttttcagcctctctggctctgccctctgagggctttttgaaggctcacagctggggtctgtcgtgttctccttcatcctgacagtcttttttttttttttctttgagacggagtctcgctccgtcccccaggctggagtgcagyggcgcgatctcggctcactgcaagctcygcctcccaggttcaygccattctcctgcctcagcctccctagtagctgggactacaggcgcccgccacacgcctggctaattttttgtatttttagtagagayggrgtttcaccgtgttagcsaggatggtctcgatctcctgacctygtgatccgcccaccttggcctcccaaagtgctgggattacaggcgtgagccactgtgccyggccaatcctgacaatcttaaatgtggacttaattcttcaggtggtctgttgcgttctatgatcttgttgctttctagttaccattttttatatttattttcatttgcttctcttctctttctgctggtttggaaattagatgttttacttctggtctaaggttaagaaggacatctatttaaagtccaaagttggccaggtgcagtggctcacgcctgtaatcccagcactttgggaggccaaggcaggtggatcacaaggtcaagagattgagaccatcctggctaacacagtgaaaccccgtctctactaaaaatgcaaaaaaattagctgggcgtgatggcgggcgcctgtagtcccagctactcaggaggctgaggcaggactatgacatgaacctgggaggcggagcttgcagtgaaccgasatcgcgccactgcactccagcctgggggacagagcaagattccatctcaaaaaaaaaaaaaaaagtccaaagttatgaggtagtctctrccttcctcccagaccaggctggcagaaactctctcctcgtctcatggcagtgctgttggctgttttaattccaccccatttccttttttctttttcttttttcttgagacagactctgtcgcccaggctggagtgcagtggtgtgatctcagcttactgcaacctctgcctcccaggttaaagcgattctcctgccttggcctcctaagtagttgggactacaggcacacgccaccacgcccagctaatttttgtatttttaatagggacagggttttaccatgttggccaggctggtctccaactcctggcctcaagtgatctacctgccttggcctcccaaagtgctgggattacaggcgtgagccactgtgcctggacgacctgagcattttcttagtccatgtttatttatgttacccacgtttcttaatcccttgactcctgttctggctttgttgcctcctttctcctcagtccttcaacaggtcccttgatgacatggggctggctctggttttccaggtktcccctcgtcccagccacctcccacagagctgcatggccaacctggttctgggcacagggaccacctgacaggcagtgggcagcagccggggcagcaggaagacctggggacagctggagttccggggtcccctgggcagccttgggggstaatgacctgccctggtgggcagcgcagggaaccacgtgcacacatgcgtccgtggaagctgcaggttcccagagctggctgtagagggtgggcagctcctggtgtgctcttaggcaggccaggtgcagaaggtgccatgctctccctaaccatccagccctcctccccagcttcatcacrtttcgctcctgtgcctacctggacaagaagcataccatctttggacggtaagggaagcggctgtgtgaagcctggggggtcagtgggctaggtgggttccttccccacctgaggcctcctcactgcctttttcgtggacctgagtcatgtgccatgctggccatcactgctgggggttgaggctatgcagagctgcgatggagggtgctccatgtgccagggaagtctggctctctagacccaccgggctcaggagaggaggaaactcgcccatgtggcctggacactgccctgtctcagacccagtggcgcgcmactcgcaagcctggccacacccagctcccttcaccctctagtccaggggtctttccagcgttgtgggccacgtggtctctgacgcccacccagctgtgtggaagcagcacgaaacagggtggacgcaggtgatgtggttctggccaagtggaactctgtttaccaaaccagcggggagagcacaagccacgttttgtgactcctatttttcctgtgggtgggggaaaccaaaaaaaaaacaaaaacagaaaaaaacccagctggatatgcccagggccatggtcagccgaccccgcccttgccactccctctcatcgccttcctggctgctgcccaaggascaccaggccagcctcggggctctcaacccctcttcccacgtgccttggggctcagccgtgggggtgccctccttgagcacacgcagacccayctctgtctccctgctgcagggttgttgggggctttgacgtactgacagccatggagaatgtggagagtgaccccaaaactgaccgccctaaggtctgtgcccagggaggtggggcgtggcggctgggggccaggcaggcagggggaggacctgccgtgcactgagccccctttgctgctaggaggagatccgcattgatgccactacagtgttcgtggacccctatgaggaggccgatgcccaggtgagggggcacratgccaccacctaggagggtctgggctagtgcacttttccaccccaagcctagcatctgtcctgcccgaggtgctgccggttagccagcgccctgttgtgccacagattgcgcaggagcggaagacacagctcaaggtagccccggagaccaaagtgaagagcagccagccccaggcagggagccagggcccccagaccttccgccagggcgtgggcaagtacatcaacccagcagccacgtgagtgcckcggggctggcctccctgtttcccatggtgtttcctagggctgactgargtctgagggtcagacccagaggggcaagcaagctatgggcactggtcccggccgtgggcttgtgctgtgtggcctctgcagccgagggactgcctctgaaggcctggccggggcctctgtgggtggaagagatcaaattcagggggatgtgggagcagcaggtgggaggggttgggcctacaccgggagggctgtatggagacacagacaagtcaggaggggctgagggagggtgtgggctcccagcggcttcttctcttcccaggaagcgagcagcagaggaagagccctcaaccagtgccactgtccccatgtccaagaagaagcccagtcggggttttgggracttcagctcctggtagcagyaggttggccgctgtggaccttggtggggttgcagggctgggggcccatgtccacatctccatttccagcctttctagcctgccctctgctgccagccaataaattgcttgcctgctgcctgcatcccctttcctggcccctgggagcccacagccttcccatcccttaacctgttgccaagggccttggccctgtttccaggacctggcccagccagagcccactgctgggaccttcaagcacaaggcctgccctacacccaggctggtgcctcaggcctcycctctagtaggcaggccaggttagtgaggaaggactgtgtctccagattgtggtttcctctttaagacagggtcttgctctgttgcccaggctccagtgcagtggtgtgatcatggctcactgcagcctcgacctcctgggctcaagcaatcctcctgcctcagcctcrcaagtagctgggactacagccgtgcaccactacatccagctgtatatgtctggttttcttacccctacttctgtcatcttctcagggacagcctatttatacaaccagtgtggtcccctgaccaacgccattacctgggacaagttttcagaccccagacttactgagcctaagcctctgcagggtgggcttctcggtctgttttgacaaaacttcaggggcttctgaaggctggtgttggacggcagcattgagtttcctgccgtgccctgcctgagctctcagggccctgctcacctgctctggctgtgaaccacctgggcttcatctcaagcctgcctggcgtctctgtgcccctgtgagaatcttgaggggacccacactgggttgaggccagtgtctcctgctgtgagaacaagtggatgtccctctccccgccctcctgctgaagtggccttgctgctctcaggcccggccactgggctccaagactctgctcctcctgtcagtcactgactctgatggccttgggccrgctgcatcagcagcccttaaagaaagacccctccctcaacccccatttttctgttaaatgtgcccctggctggctttttcttcgtcttcagcccaggccagtggtcagtgttctcatgtcatggactctccttgcctgacacttgcctcttgggctccctgttgccctcaggccaccccccacttctagttcttcacactaagccctaacttaggccttgttcttggttttctcatttttgttgccccaaatcttgaacctgtcagcaacttgcaggctgtacctctgcccttccttttctcatcaatcactgatgctgaagctgcaggcctgagccctttgtctccctggatgctgggtggcgcctcatctgcatctctgcctcaccccatccactgccacaggctgcctgatgaccactagaggtatgtctgcccctcgtcaccctgctgcacaccaatctgtggcccttcatcatgctaagaacaagaactgcgccatggctggctccttctcttctccagcccatccctctgcagcctgtcatccctgtctgtgaccattggtcgggcccctgggctctagagtgacttttgacgccctccatccctcccgccaggcactgtcctccgcaaggcctggtgcagccctggcagtaactggcttgtaagaggctcagacaccaagctgggcctgcagaggaggggcacagtaggacacagtgactgcccaggtgtccacacacctgtaggcctctgagccagcgtccagggtacaggtgcgggtggtggggatgaaggcctgaccagggagkgagaagcaggtttggagaggaccctgtgcccaccctgacagacaccctggctggccctgactgactgtattctctggccacattcaagtcccccattggtgggggcagagaagtaggaccaggccrtccttggctccagagctcgaagaccccaagacagccctctgctctcagcggcgccacagagagcctgggctcagccttctgcatcaggacatggcctcgtccactgagggcacgatttaaacatttgacatcagaagctttatttgtaaacctcacacagataaggaccaagggctggcggtgtggccagaggacaggggaagctgaaggccccgtgcttgagctcggcagtcctgctccttgcagtgaagccaccatgggtgaccgtccagcctcacccggtggcctgcacagtgagggaagggcttcagggccatctgctcccagggcaggggacaggccaccaaggacctttggcaaatgaaggtttacatttctgtagtttgtttgttttagagcttaatttgtagttttttagctattaaaaccatttgaatttttaacgacctgatgagggcatcaggtaaattaaaggattttgggaagattcttattttcaattctaatatctgacagatgccatcaagaataagcattaaggtataaaaaatactgtgtgtataaaacaatgccaaaccacattcctacagcaaatgcactgtgccatttataaccctgacatcacctcccaaggctctcaaggaagatttattttaaataacttaaatagaagtcctagatgatattgtttaggaatttaagagggtggtggatatggtcctgtgaatagcacttcccctgaagccagctcatggtctgttcatttggtttaaaaatgagcttgtattttgcagaagcccaacaaaaaaaaagtgataaaagtgttgttggtataaattacaaaaaaaaaaaaaaatacaaaagtcataagactactagtaaaaaatgttcaatcaatgccgtcacaaaagacagtacaaaaaccaaagtgcccaaatagaaggagcagcgaacttgcccaaaacagaaaagctctaaatagaactttagtatatacaaaaaccactcggtagagttttagaagtttcttccatgtaagtgaagcatcttgagtcactcaggacttggctgtcctcgcacccgtggcaggctggggacggcacgracctccaactgtttcccctagtccccggggcatcggaggctgggttcccacatgggagaggaatgaagactcactcaaagggaagggtcagtttaagataagttttcagtgaactccttcttccacccgggaaggtgtctttcagcctcttcacagtctcaagacaattgactgaagccacaggcattgctaacttcatgggccagcttgtgggcggagcctcttcaggcttgagaccatggcagcaagagccctgcagcgtgcagtgacccctgcgctctgggtggctgcaygcgagctcaggaggacaggatgtgctgggccagcctaaaccctcgggggagactagcgcagggataaagcagcttgcagggccatagccggatgtggaggcttccaagacagtacaaagatttccttcctttcctaagtggaagatgtgctttaaaggaacttctgcctctgtcactcctgctgagtggatgcatctcagtgccatgcccaccagggcagcggcatttcccacctgccaaggcttccaggcttgggcaaagagatggcacccaaaggcatgctgtgtgtgggcagtgagctcgagtgggcacagcccagtgcctgcctggaccgcaggtctgggtttaggaagggctgaagtcgggggaggtgtgaagctgggcaggtggccacgttcttattgtcagccagctcgcactcttgcccctagactagccttgtctgaaggcagcttcagagccacttgccaggctgagaactatccgggctcagtgctctcctatctgctgcccctcggtccccctgcctgccctctgccctgagacaagttactaaatgttgaaaaccaaacttatctgggagtggtttttgacctccatcctctgcaaagtggcctaaacccttatggggtgcccactcctggtggagggcaggtggatgagtggattgtaatttataataaaatatatggcagaaacacaggccttaggagattgcacaggcccctctatcagttcaagtgacatgggacagcaccacgcagggacgggcaacgcgtctagcaggccaggcgtcttcatgcacaaaggctaaacttgttgctttaaccttttctgaacaaattttaaacattctggcaaatgtcaagttttgaagtttttcctgtgggttctggcctctttcatatgcaaaaataattctttttcttcaagtacatccagggtagaaaatgaaatctgacttttcctcggtccagtgtgttactctatagacatggaccagccactcagcaactgcctgacacctaagctgctgtcactgctgagggcacaacccctggtaccagaccctgtgaggctgtcacctcagtaagggcacctctgcgggccccgggacagccttctctaagggctagctcacctgctttctagataaggaatctactggcttaaataaacatgttccactagacaccattctcaatttagagtgtatctaaaatgtcatctgtgctggcctctgtttttgaacaagctaaaaaccaaaaatgcccttagtgtataagtctgttgactgcctctggaagattcttaaataacactgtactttaagggttcatttgcaagaggaatagccaatttgaagttctgcaaatttaagaaaaacagcggggtggagggtgggctacaataccttttctctaaaaaagggaatggtgagacttgctatctaaagagaccctgtccctgtggtcttcagagactcagtctggttctcttttgttttaaattgagacggagtctcgccctattgccaggctggagtgcagtggcgcgatcttggctcactgcaacctccgcctcctgggttcaagtgattctcgtgcctcagcctcccgagtagctgggattaaaggcatgcgccaccatacccagctttttttttttttttttgagacgatgtctcacttttgtcccccaggctggagtgcgatggcatgatcttagctcactgcaacctccgtgtcccaggttcaagtgattctcctgccttagcctcctgagtagctaagattacaggcactcgccaccatgcccggctaattttcgtatttttagtagagatggggtttcaccatgttggccaggctgatctagaactcctgacctcaggtgatccacccatcttggcctcccaaagtgctgggattacaggcgtgagccaccgcacccggccccagtttggttttcaactgaaccttaaaaaagcagagcccaactatattgaagacaaaggtgaaaggaagatattaactaggcaggtaagtcatcagttggttaattctttctctagaacttgagaagttagaaaaagctcattgaaaattttcagaaacaactgtgtacacgaagaggacagatccgagggacaccttacccacagagatggccgggagtgtcaagagctatgcgcagctagcctttgaggtcagagggcaagaaaggctgtcaccagatgctcctacgtttccattacattcacagtttctttcacaaaacagcattcgaaggagaagggaaagttcgcacattactcccagccattgtctttgatcatatgagcaagctcaatgatgaattttccttccttatatttctgactgctctcaaaggcatgctccttgaaaaagaagagacaaaggtttcaggacagaaggtttcacttttcaatttcatcactcttttggcaaaaaacccccccaagtctatactatgaactatatacccagatgttccctgagcggtgcactcatccggcgctgggagggtctgttccaggtgagtccattgaggcagtgtaggtttactttgcatttgttgttaaaggtttttcatgtgctcgcttcggcagcgcatatactaaaaggtttttcatttgtttgtttgttttgagataaggtctcactctgtcactcaggctggaatgcaatggtctggtcatagctcactgcagccttgacctccaggactcaagtgatccttccacctcaggctcccaaagtgctgggattacttgtaggacagtgtgaatgcagatctgtttactgaacatttactacatgtgggacaatttaagaggcttgaagagatgcaaaagactacactccaggaattccgtgcataactagcgtgaaggcaaatacagggagagtgacataaacaggtcaaagacatctggaggctgggcgcagtggtgcacacctgtcattccagcactttgggaggccaaggaaggaggatgacttgagtccaggagtttgagacaagcytacgcaacacagtgattttcttctacaaaaatcaaaaacttagctgggtgtggtgtgcctgtagtcccaggtacttgggaggttgaggtgggaggactgcttcagcccagaaggtcaaagctgcaatgagctgagatcgaccaagaccctgtctcaaaaaacaacaacaaaaaacaggatatctggagaaggtccttcatggggaggagttaacatctctcccacagacacatcctcatcattttgttttgctgagtgtgtggcctggtgctagggacacagatgaccaagatggatcctgcctacccaagcggcagccccaggtgtggcagacacaggaaggactgtgccagcaggaagcgggtgcagccatagaggggaatgcagtgtggtggccatgcagggaaggcacgggtttctggaagtggggcccacagatgggtatggggctgactgaccaggggaagggctagggatgcgtgctagtcttgtggagcccgtttccatggtgtgaactgtggccttccaaaactcatgaggaatctgggagaccagagatgatcaggaattcaggaaagaggcagagcaggtggcctggacccgaagaacaccagagccagaatgggaaagcctccttcaacaaaggcaggcaggccgggcgcggtggctcacgcctgtaatcccagcactttgggaggctgaggtgggtggatcacttgaggtcaggagtttgagaccatctcaaaaaacaaacaaaaaaacaacaacaacaactggggaaggcatgggagcatccaacagaaggcagatggccagggggtcaaaaccatggaatctcaggtggcctgggggaggggaggactcggccacgaaggtcagagagagtggagcctggaagagagacttcagggcagcgtagaggagggaagcggggcaggaaggtgcagggcctgaggaggccagatcagccatgtggtggagagagaagggagctagaggtgaaggctggagaggaggtggcgattgcaaccttcaattcaaggtccctgagaaagagggatttggggtaaagagctcatggggcagctctctgtctctgactccagcaggtctggcgctgaggtcttctagacttgtccctgacagtgggcacagcctcccgcagccccctgcagcctcctcggcctcctcccacaccaggctctgctcagcgggccgagggcgggctgggtgcagagagcctggcttaggaagaaacagggcttgaaaacatggtgtttttgttttttgttttgggttggggtatcactgtcacccaggctggagggcagtggtgagaccatgcctcactggagtctggacttcccacctcggctgaggaactggggtttctgaaagtgctgtgactggtaccatgggccacactgcacggggaggtgtggctcagtggcaacttagtgccacatccccttgtggcacgagcatccccttgtggcactcacgtatttccacccgagcgtggtcttgcagttctcgcagtagatgtcggcaaccgcatgcagcccggtgagaaggaccctctcctctgcagggccgcagcccacgttcaccctgcggggacagaggggccactgcgctgcaggcccggcccgcccctgaccaggccctgccccctcagcgggccccaccccatcctcctaagagttcccccaaaacagggaaactcccagagagcagtgccgtgcctctcccccagccctgcccgccaccaccatcaatgggaaagatcagtgatgggacaggctagggggcaagatccttagcgcgtttcagaaactcccggsggggggatggtgggttctttcaggacccctaaagacccaggtgattctacacagggcactgtgtaggtgccatccaggccgtcccagggcccgtgccgctccccccgggctgaaccagggtactcacacggaattgaagaggtaggcgcgtccctggctcccctgaaaggactgaaagaagaaggtcccgtgagattggctgcgagtgctttctggaacgaagcggtgctgcccagaaccaggggagtccagccccgcggctgttagctgcgccgggacgcgtcaccgggagcagacaccggcgtcccccctccagaactccacttctaataacagccacttaacggagctgcaagctgtttttcattgtagacaggagtggctgattctgctgcgtcaacattctgcaagtgactattattgggaatcatggcaagatcagtttttaaatggtgagcttcatatgtctggacaactttaccttagaggagttctgagaggggatcacgaatgattttctctacccgaaaacccaca

SEQ ID NO: 95561 - DNA, 30356 bp, Homo sapiens
  misc_feature (1)...(30356): n = A,T,C or G
ttcaggaaatagttaacatcagctgggtgcagtggctcacacctataatcccagcactttggaaggctgaggcaggtggatcacctgaggtcaggagctcgagaccagtctggccaacatagtgaaactccgtctctgctaaaaatacaaaaaaaattagccaggcgtggtggtgtgcacctgtaatcccagctactctggaggctgagaagggagaattccttgaaccggggagatgaaggttggagtgagcagagaccgcgccattgcactccagcctgggcaacaagagcgaagaacaaaactatgtctcaaaaaaacaaaacacagcaaacaaaaatctattttgaaagagatgagagtgagccatataacttgtttaaacaaaaggaagttgtgttgtcgtgtaattaaatgaaaatactaggaagtgaaataatacctccaatggaaatggtagaaagcagaactgaaaaacttctgctaggtaggatatggtaggtctctgcacgccaccactcccattgcaaccgctagggaaaaaacagctaagatgaaaatgtctttttttttcttttttttttttttttgagatggagtctcgcgctgttgcacaggctggagtgcagtggcgcgatctcagttcactgcaacctctgcctctcgggttcaagcgattctcctgcctcagcctcctgagtagctgggattacaggcacgcatcactacgagcggctaatttttgtaattttagtagagacggggtttcaacatgttggtcaggctggtctcaaactcctgacctcaagtgacccgcccacctcggcctcccaaagtgttgggattacaggcatgagccaccacgcctggccgaaatgtcttatttttaaaaagaatgaagagtggtcacagaaataaagactgaatggactaaaatttcaaggagggaagagcccttccgagttgaactagtgataggcagctattttcttccctgaaacatttgcccatttgggacatgaggatcagacttggcccaagcagagagactctactggggaagagagaaaggaacagtttttggtagttgcaaggacttgctatggattaggacctagaggagcacaaaatgtagagtgttttccccatgggacatttgctgagttctgaggcagtgcaggagactgagaaggcaagtcccacagtcttgcagtgtttagagaggaggcctggagtgaacaaatagctggtctccccaacataaggtatttgccaggttttgcgcctgtgtgggttgggaagctaaagggctccctttaaatctctgaagagcagaactttaagatctgagagagacagagactgactaggctttcaatccaaaatccaagagggccattcctaaggaacaaggacaaccaggaggggattgaattttactgcaattccaacactgccccaacccagttcagtacgtaattgcatcgaagtgactagctcctgtagggaataacaagatttgaagcccctatccttcttttatacccaatatgtgacatacaattaaaaatcataaaccatgcaaaaaatggagaaatatgggtctaatacataaaagaaaaaataaataaaagcagacccacatgtgatccaggcattggaactggcaaagatttttaaataacttggttaatatgtcaaatagagaagaagatggacaaaaaagaagcaaatgtagagaatgtcaacagagttggaatctattaaaagaggatgaaaggaggctattgaactgaaaaatacccctgaaattacaaactcattggatggatttcataaacattgatagaagtaaaggataaaatcacaatcgaatttagaaattaagtcatatcagaaaacagaattagtgaacttaataggttaaaaggaggtacctaaactgaagtacagagaggaaaaaagagaatggaagctaagaaacatgggactatatgaataattcaagttacagaagaagtggagagagaaattaggtccagaacaactggaaaatgacccaaacgtatatacagcawtaaaaacaaacaaacaaaacaccactaatatatgcaccgacattgatgaatgtcaaagacgtggttgggcacagtggctcatgcctgtaaccccagcactttgggaggccaaggtgggcaaatcacttgatgccaagagttgaccagcctggccaacatggtgaaaccccgtctctactaaaaatacaaaaattagatgggtgtggtggcacatgcctgtagtcccagctactcaggaggccaaggcatgagaatcacttgaacccaggaggcggaggttgcagtaaactgagatcgcaccactgcactccagcttgggtgacagcaagactgtctcaaaaaaaaaaaaaaaaagtcatactgagtaaagaagccagacatgaaaagagttcatacttatgattctattttatgaagttcaagaacaggcaaaactaagttacagagaagtcaaagcagtgcttatgtctggagggtcctgatggaaaggcgtgtgaagatggaggggaaaaggttcaccatggtgcccttacaaccatgtgtgtctctacatgggccacataggcaaggctggaccacagtctgacagccactatggtgtgcttagggactgcttggccacttaacacgggaacattttgggtagatgggaatgtcctgcattttgatctgggtggtgattatgcttgtgtatgtatttatcaaaacccatcaagctgtacacttaagatttgtgccacacagtgtaaactgtacctaaatttttaaaaaagaaccaccagacaacaaacaagaattcttgaaaattgagattatcaggctgggcgcggtggctcatgcctgtaatcccagcactttgggaggctgaggtgggcagatcacctgaggttgggagttcgagacgagcccaaccaacatggagaaaccctatccctactaaaaataccaaattagccaggcgtggtggcagatgcctgtaatcccagctactcaggaggctgaggcaagagaatcactcgaatccagaggcagaggttgtggtgagtggagatcacgccattgcactccagcctgggcaacaagagcagaactccctctcaaaacgaaggaaaaaagaagattatcaccaaaatgaggctgagcacggtggctcacgcctgtaatcccaacactttgggaggccgaggtgggcaaatcacctgaggtcaggagttcaagaccagcctggccaacatggtgaaaccccatctctactaaaaatacaaaaattagctgggcatggtggtgcgcgcttctaatcccagctactcgggaggctgaagcacaagaatcacttgaacctgggaagcagaggttgcagtgagctgagatcacgccaccactcttcagcctgagcgacagagtgagactttgtctcaaaaaaaaaaaaaaaaaaaaaaaaattaccaaaatggaaaattcaatagaagggctggaaaataaatctcccagaacacaaggcaaaatatgaaaagacaaagaggatgatgagcccagtctaggtctaacaccctaataacaggcattccagtgagtaaacaaacctggaaagctgttcctgatggtgataaaagaagtggcagtcgagtgcagtggcttatccctgtaatcacagcactttgggaagctgaggcaggaggatcaaggccaggagttcgaggctgcagtgaaccatgatcacaccactgcactccagcctgggtgacagacaagagcttgtcaaaaacaataaaaaaataaaaagagctgggcactatggctcatatctgtaatcctggaactttggaaggccaaagtggggggatcgcttgagcccaggagttggagaacagcctgggcaacacagtgagaccctcccacccaccacaaaaaataaaaaaattagggccgggcacagtgactcacgcctgtaatcccagcactttgggaggctgaggcaggtggatcacctgaggtcaggagttcgagaccagcctggacaacatggtaaaaccccgtctctactaaaaacacaaaattagccaggtatggtggcacgtgcctgtagtcccagctatttgggaggctgaggcaggagaatcgcttgaacctgggaggcggaggttgcagtgagccaagatcgcgccattgcactccagcctgggcaacaagaacgaaactccgtctcaaaaaataaaaataaaaaaattaaaaaataaaaaaattagctgggtgtagtggcacatacctgtaaggctcagctactcaggaggctgaagtgggaggatggcttgagtctggaaggtcaaagatgcagtgagctgagatggtgccactgcactccagcctgggaaacagtgagatattgtctcaaaaaaaagaaatggtcgttaaataagagagagcattgatcattctcagcaaactaacacaggaacagaaaaccaaacaccgcatgttctcactaataagtgggagttaacaatgaaaacacatggacacagagaggggaacatcacacaccggggcctgtcgggggttgggggcaaggtgagggagagcacctaatgtatgtggggcttaaaacctagatgatgggttgatgggtgcagcaaaccaccatggcacatgtatacctatgtaacaaatctgcatgttctgcacatgtatcccagaacttaaaggaaaatttttaaaaatgagatggcattatatatctcattaatcagctaaaacattgtttaagcaatatccagcagtttgttattgatggtgtaaactggtacagtcttttgggggagcgatagtgtcatcagtcatctctgtccttatcttttgcccgggtaacttcactgttgcaaattcatcataaaataacgtcttaatctgttcgggctgttaggacaaaataccataaagtaggtagtttatcaacaacagaaatgtattttctcacagttctggaggctggaaagtccatgataaggcataagcggattcagtgtcgggtgagggcctgcctgtggtgcacagatagtgccttctagctgtgttctcacgtggttgaaggggccgactctcggggtcatttgataccggcactaatcccattcatgagagctctcccttcaaactctgttcacccccaaaggcccatctcctaataccatcatcaccttgagggattaggatttgaacatgaatttggggggtcacattcagataatgttatatataacttaaaaagaacaaaaatgtggaattcatggagatgttcattgcagtatggattacactgaaaaactgtaaacaacctagatgcccagtaaaagggaaacagccaagaaaagtctgtgtcttgttcactcgctggcaggaaacatagagcaggcacggaaaggaaagggactcgaggaatgcgctgtaccgacaggaggcagcacccctttgcccgaggggcgcaacgacagagacctaaggctacctgggccggagccgggtgaggccgcggagaacgcaccccgctacgcgtctgccgagacggaggcgggcgtttcgaccactgcccgatcatgcgcttactcaagtaggattccgaaaaaattcagtcgcgcgtccctcctgaggttccgcagctggccaggcccggcccgggctggtgcggctgcgcactgcagcccagcggacgggcccgggaggagccgggcggggaccgcggcggccagagctcctgtcagctccgccgggcacacgcaggccggggcgggcggcgcggctgtccccgccccgcacgctgctgggcccggcagcttcagaggctggcggacccgcgcggggccggcgcagcggagcgcgccggctgcccggggcccagcgggagcgcggcagcggcgcgcggagcagggggctacgggtgrgcgkgcgcccgccttcgcctgcgtcgctgcctgcacgcgggccgccgtccccgggcgtgtgagagccggcagctcggccgactgggcccggagcggcgcggaggccgggcgctgacggtaacgggccgggtgcgcgcgcgggagggctccggctgccccgacagaggccgggctcgggcggcgggagtgcgagcgccactgcggcgtcagaggggccaggaagggacaggaggctgcctgaggcccgtacctggcgcctgtctctgcggtccccggggccgacgaagtcggagcgggtggggagggagccgggcgggcggccagagacctggcggcaggtgcctgccctctgtgatccaactctctccccagctccacccacaytggcctagacccagtctctaagggctgaaaatattgcccggaagctcccgagcagaatcagatcgcgctaagtagggcacaacgcagaggcgacaaagctcctcggccccagggcccgcggagcagactccggagcgcggtcccgcccacgctcggctccgcagttagcgtcctccttcctcctgagcaggcaagcggagcccgagggcggtggcggcggggggcacgggtcccctgaagttgcctcgcagctgagcactgggccccgtctctcccttcccagggggccttcggcgtcactgcaggcttcctaggggtcccctaagtgctctgcaaaccgcggctggaagtttcccactgcagtgaacagtagagaaacagggagaacacacagggcttgctttatgctagaaacacaagcatctttcttctttattagaaagaaactcattctgtgtttctgagaaaggatcgtgccaggcactgtttctggtgagtgccagtttgacccgaaagggcactgagaaaggctttcctatcagtctctttgggttctggctaaacttttaaatcaaacaaaatagagactagcttattcacctgaaactagaagcacatggccgaggagcctgaacaggcacctcctatctaggcagggaagctgtgtaatcaggagcttgtgtggtgcgctccagtcggagctgggactcttatcctgggcccgtttttcatagcaccagccaaaggagagcgtcctctccaccctagcggcagagctgctaccaggaccaggtgggccagcctcagatgtgctgcttgtgctacttggagccaggcaaatgggtgttcctttggaacagccctcaggaactcactggggtatttggtggaaagactgccacgggcattttgcatgttggagctacagatggtgtccttcctgccaggtgtgtgtggaggccagtatgaagctgaaaaagcaggtgacagtgtgtggggctgccatcttctgtgtggcagtcttctcgctctacctyatgctggaccgagtgcaacacgatcccacccgacaccagaatggtgggaacttcccccgggtgagtcgtgcctggttgctaatttctttgtatacaagtcacctgggctcagggtatgcacctcccaccccgccgcctcccctcccaccccccgctggagggtaatgtcagtacagracaggagccttccttcccaatagtcaggttttgtagaaaccctcagctaaaaacagtgatggcgaaaagaaggaaggaagaaaaaaatgtcaatggcaatgagtattgtcactctgttctcctgaattcttttctttctttttttttttttgagacagagtctcgctctgtcgcccagccktgagtgcagtggcgcgatcttggctcactgcmacctccgcctcccaggttcaagcaattctcctgcctcagcctcccaagtagctgggactacaggagcctgccaccatgcccgactaatttttgtatttttagtagagacgagacgaggtatcgccatgttggccaggctggtcttgaactcctgacctcaggtgatccacccaccttggcctcccaaagtgctgggattacaggtgtgggccaccgcgcccagcccctcctgaattcttggcagacattgctaattgattgcagcattctttgccattaagccccgctgaaatcctcagcacaggcaacaccgattgttgagaataggtaggtgaaaggaaatctttgccatccctgagctagagagtgatggttctcccaacccaagtggagtgtagtcctcagtggtgatctgcacagctccctttatctgaacggtgtcatctatccctctaggctcatggtctggctttgactgatgagggaagaattgtactcaggcctcagctggtagaccccaagcagagaccctccctgtggcataaggagctgtgtgtgattgctttctggttttttggcagagccaaatttctgtgctgcagaaccgcattgagcagctggagcagcttttggaggagaaccatgagattatcagccatatcaaggactccgtgctggagctgacagccaacgcagagggcccgcccgccatgctgccctactacacggtcaatggctcctgggtggtgccaccggagccccggcccagcttcttctccatctccccgcaggactgccagtttgctttggggggccggggtcagaagccagagctgcaggtaagagtcagagctggcagggacgtacagtggccacgactggggtactgagctgcagttcacctggcagatgctcactgtgtcggaggagctgccgtttgacaacgtggatggtggtgtgtggaggcaaggcttcgacatctcctacgacccgcacgactgggatgctgaagacctgcaggtgtttgtggtgccccactctcacaatgacccaggtgagggccctgcagactcctgggagctggagtgtggagtgggatttctgatggccaatacragggagggacgtcgaagaagatggtggcatcctcaggggaccctacattggctccctaggctggatcaagacctttgacaagtactacacagagcagacccaacacatcctcaatagcatggtgtctaagctgcaggaggacccccggcggcgcttcctctgggcagaggtctccttcttcgccaagtggtgggacaacatcaatgtccaaaagagagcggcagtccgaaggccagtaccaggcggggaggcatgggagggcattgtctgagccccaggctgggtggacgggtcttaccttaagctatgggtgccaaggtggcagggagaggcccagagagctgtggaagagatgagtgatggtggagggagggaaggcaaaaacagataggttccgagataagcggggccaggatagcctggaggttggctgtaaggaaaggagggcaagtgtgtgttctcttggtcctgggattgggagaactggtccagtgaggccagtgcacacaggccctgacatttgctggttggcaggactgggcagagtgtcctgctcygtcctgagtgtgagtccttaactataggctggtgggaaacgggcagctggagattgcgacaggaggctgggtgatgccagaygaggccaattcccactactttgcattgattgaccagctcatcgaaggwcaccagtggctggagagaaatcttggtaagtccaggcccaggcatgggggtctgcccsctgggctgtaaggcacaggcaggggctgtaaggcacagggatcggcagggggtggttcctttctaggcagatcccaccatgtgggcctggtgtgatatcatctctccactcactaccaggacaagagctggggtcccagcacctggaaggccggggggccagcccctgaggtgtgttcagggcctctctggcttccatgccctgcccaggtgcaaccccccgctctggctgggcagtggacccctttggatacagctccaccatgccttacctgctgcgccgtgccaacctcaccagcatgctgattcagagagtgcactatgccatcaagaagcactttgctgccacccacagcctagagttcatgtggaggcagacatggggtaaggccgggtagggtagagggggttactgcagcatagtcttcactggggaacagcagggatatcagaactaagacccccactgttcttcagagcagacctgcwggcactggtgtggactgccagaaatggtcgcaccctctggttaggggagggccatattgacctctggcctctacagggcctgctgtcccaagggcttcagcrtgccctgtgtgcccgtcccctgagggagcccctcatgtctttctccctggcctacacactctctccagccctaggtccagttacagcctcrcggtctatcagggctgcctttagcctgaacagatccttgcccccctggcgtccagaggctgcctgctggtggtgaccacgtggtgtgtctcctgcagactcggactccagcacagacatcttctgtcacatgatgcccttctacagctatgacgtcccccatacctgtggcccagatcccaagatctgctgccaatttgatttcaaacgcctgcctggtgggcgcatcaactgcccttggaaggtgccaccccgggccatcacagaggccaacgtggcagagaggtatctgcttccagccctttcacttcacagaggaatcgggaggcctggctctggtctgggccgtgccacgtggagggtgggctcaggtggtgagttgaggctcctagcctctgcagcagcagctccttactaagtctcctgaaaaactggaatggctcttgcaaccacctttcacagaatgcttttaggttctcacatgagtacttcttgatgccctaacaaactgccagggccagctgacaacttagaggtgaaggattcccaggttagatgtatgttacaaacttcaggctcatgtgccttcacttagtgccagtgttctgacttggctttaagtcaaccacgagaatcctgttcagatccacattcagtcccacgagatagcctccagcctctgagaaaacagacctgtcccttttgagagaatttagggacccctaaagatagcactcttgctgaaatcaggccccgggggaaagtgttaggtaagagttgatccaaacagcaatttagtcagaaccttaagaatacgacaagttggattggtttttatgttgcartgctctgatttctccctgatgtccaagagttgaaacgtgaccaaaagggaaataaagtggtcttttgtttccagaagtctaaatggcgattccaggcaagaatctagggctatgagggcgtgacttttcttaaagcagcagttgtgatcagtgaggctggcctaggtttacaagaacaggccctgaaaggtaaccattttctcctttgaaargcttactagactgataagttaggggaaagtggtatttgaggaatcctctcatgagaacagagtagaaaagtacaagctgggccagcgscgctaagtagattagttgactctttggactgtgatatttataacatgscaattaaagtaggaaagggcttctgctgatgtgccacagggctgtttttctactgattttgccaataatttggatgaaaagaaaagaaatgtttatatatagttcccattatgtaccaggcactattctaagtgtttaacaaatattcattcattgattttattttatttatttaatttaattttttttttttttgagatggagtctgtcacccaggctggagtgcggtggtgcaatttcggctcaccgcaacctccgcctcctgggttcaagtgattatcctgcctcagcctcctgagtagctgggattacagatgtgcaccaccacaccyggctaatttttgtatttttagtagagacagggtttcaccatattggccaggctggtcttgaattcctgacctcaggtgatctgcctgccccggtctcccaaagtgctgggattacaggtgtgagccactgcgctcggccyattcaatccattttaattctcataacattatatgggtacctacggatgttatccttattttgctagaaatggaggctcagagaggttacttgcccacrgtcactgagctagtacttgtggagctggtgtgatatggctccggggtccagacccttcactttggtgctgcatcgctaactggtgggcaaaatgaggcgggagtgtcagaaccaggatcccaaaagatctcaacagcctagcataaaaaataacatgtcagctgtcagaactgcccagagagcaccggactcccctggggctgggattcatgtgcaggaggtgtctgtytgcgctgaaccactccttggtggatgggatgtcttctaggggcttgctggcgggatggctgtgcgtggtgctcttttactgatgagacttcgtggtgggcccatgttttttttcctgccccagggcagccctgcttctggaccaataccggaagaagtcccngctgttccgaagcaacgtcctcctggtgcctcttggagatgacttccgatatgacaagccccaggagtgggatgcccagttcttcaactaccaacggctctttgacttcttcaacagcaggcctaacctccatgtgcaggtgtgaggggcacttgactggggaggggcctcacagtgctgcagcccatcccttcccgtgagaccgtgccctgggttcccaactcgggcagggtgccccccytttttttttttttttgagatggagtctcrctctgttgcccaggctggagttcagtggcgcgatcttggctcactgccagctccgcctcccgggttcacgccagtctcctgcctcagctgcccaagtagctgggactacaggtgcctgccatcayrcccagctaattttttgtagttttagtagagatggggtttcactgtgttagccagggtggtctcgatctcctgacttcgtgatccactcgcctcggcctcccaaagtgctgggattacaggcgtgagccaccgcgcccagycgaaggtgccccttttatgtcagaattaattcccaggctcccctacttctgttaagtctagaatggcaggatgtacagttcctgcttctgaggccagagcccctgcctcacccccaactgcagcactgtggccacaatttgcaggaggctctagaactgatgggagtgggtttttggggttcccacaggcccagtttggcactctttctgactattttgatgccctgtacaagaggacaggggtggagccaggggcccggcctccagggtttcctgtgctgagcggggatttcttctcctatgcggaccgggaggatcattactggacaggctattacacttcccggcccttctacaagagcttagaccgagtcctggaagcccacctgcggtgagaccctgtccccgcttccaggctggakggggagagtcagcctttggggtttaaggaggggctggattggctcagaagggaatagataggcccagaggccagggcaggtagaggaggggtgsgaaggaaggaggctgcactggcagagtgtgggtgggccctggctagtggtgcaggctggcagctaacttctctctctgggcaggggggcagaggttctgtacagcctggctgcagctcacgctcgccgctctggtctggctggccggtacccactgtctgatttcaccctcctgacggaagctcggcgcacattggggctcttccagcatcacgatgccatcactggcacggccaaggaggctgtggtggtggactatggggtcaggtgggagccttctcttttcccttgtaagctcccctgctcactgtcccaaagaaaggacattgggtggtcagggggtaggccggcctagggcttgtcctgctgacaaggcagacagcttccctatggtcatcttctctccttccctctcctgcgccacccacaggcttctgcgctcccttgtcaacctgaagcaggtcatcattcatgcagcccactatytggtgctgggggacaaggagacctaccactttgaccctgaggcgcccttcctccaagtggtgagcccctcctgggtctgcatggggaccctctggtgtgtgcaggtcccatcccaagagctgctggatgggggtgccgcttctctttttccttccccatccggatgagttctgtgcccagtgcagccgctggtccacacctgggacaggtggggtgggaggaggctgagcccatgatggttcttcccttccggctcactgaattccaggatgacactcgcttaagtcacgaygccctcccagagcgcacggtgatccagctggattcctcgcccaggtaacctggactacgccatgtgcagagaggcagagccattccctggctctcaggcccctctgccccagcatgtgctgaaccagtgcagggcgcttgccctggycggaagcagcagcctcctgggtcagcccaccttctacgcacaggtttgtggtcctattcaacccactggaacaggagcgattcagcatggtgtycctgctggtcaactctccccgcgtgcgtgtcctttcggaggagggtcagcccctggccgtgcagatcagcgcacactggagctctgccaccgaggcggtccctgacgtctaccaggtgaggtgtgggcttgtcaggtgggcctggccctctgcccgtcrtgggcccctcccygcccggcgacgccagcctcccaccctcctgcttgtggccctgctactctccaggctgaggacaagtgtcctggggagggggttgtccagaagacaggcactcttgggatttgagcgtgtccttgaaaagaaggggaaggttggtatggtaatagtaatggtaaaaatagcagttataatgccccatcattcagtcattcaatgtttatcgaaagcttaatgtgttgttaccgcttcatactttttcaaatatcacttgagaatcataaagtctgatgaggaagaaagggcaaatcagatcacctccactttggaggaggggcagaggcccagcgggtgcaggggcttgctcaagccctctgttagtaagcggatgcctcagcacccctgtggcgaaagccgtgcccccacttcctcacccctcctgtgcccacaggtgtctgtgcctgtccgcctgccagccctgggcctgggcgtgctgcagctacagctgggcctggatgggcaccgcacgctgccctcctctgtgcgcatctacctgcacggccggcagctgtccgtcagcaggcacgaagcgtttcctctccgtgtcattgactctggcaccagcgacttcgccctcagcaaccgctacatgcaggtctggttctcaggccttactgggctcctcaaggtaaaaggccagggtggtggggaagggccaggggccagagtagggcgtgtgtggtggtggcactgtgcagagcggcctcccggccctgtgagcattctgccacctgacycacagtggaccggggcctgggccatctcagctccagcctgacagcatggggaagcagggcacggctccttggggaagctattccgtgtcctcccaggaggcaggcctgacatgctggtgtggggccaggggtcagggctgtgttttttggcagagcatccgaagggtggatgaggagcacgagcagcaggtggacatgcaggtccttgtctatggcacccgtacgtccaaagacaagagtggagcctacctcttcctgcccgatggcgaggccaaggtatcctaaagatgccttgaacaacctggcagggagggcaggagggggcacaggccttcccacagktttattgctgcctgccaggggccttgtctttcctgttcagcccaggggtgtctgggaataggtgctctcttgcccagccctgggctggcaccttcctgctttgccctctgtgctgtagtttcaacagcaatctgctctttcyctagccctacgtccccaaggagccccccgtgctgcgtgtcactgaaggccctttcttctcagaggtggttkcgtactatgagcacattcaccaggcggtccggctttacaatctgccaggtgagccctgcatatgaggaagggtctggaaggaggtgtgggctccacaactgtggcgtattcttccttctgctgcttctctgttcatacctctgttccgtatcatttgagacagggatgctccattctcttggagaaaaagtcatccagaaatgccctggggatttcttgggaggttggacagagcctctccccagctcggctctgatcccccagcccagcctcttagctgtgcttcagcctcacacctgtccatgcccccactttgttcctgtacccaggggtggaggggctgtctctggacatatcatccctggtggacatccgggactacgtcaacaaggagctggccctgcacatccatacagacatcgacagccagggtatcttcttcacagacctcaatggctttcaggtgactcctgggcctgggtctcggagaccccacagagtagaacttggactctgcttttgcccctgtcacaggccctgggggatgatctgccctgatggagaaagatgaatgagaggcgaagagttatcggggactccttcagtctggggaccgcttgggcccacatggtgcccgggtgcccttgatctgctggccttgcccccacaggtgcagccccgacggtatctgaagaagctccccctccaggccaacttytaccccatgccagtcatggcctatatccaggacgcacagaagcgcctcacgctgcacactgcccaggccctgggtgtctctagcctcaaagatggtgagtagggcccaggagttctgcagagggtatcagacaaaaagaagcccgtccccaccctcaagggctccccgctctgttggcctcccttgcctctttctggactgcatcacctccatgcttggagagggggcaagccattcagagctcttggcacaggaggcaggcatctgctgtccccatcccctggtggaggcagcagtgtaggcaactgggtggagtgtcctactggatsccctgaagaaccgtcagggttacaactcttggggccaaagaaaggaaaaaaaatgtcaaaaagcaaagctaggcacrgtggttcactcctgtaatcccagcactgttgggaggccaaggcagaaggccaggagtttgagaccagcctgggcaacaaagcgagacccaggctctacaaaaagatttaaaaattagctggatttggtggcacgtgcctatagtcccagctactcaggagactgagatgggaggattgcttgagcccaggagctggaggctgcagtaagccaagactgtgccactgcactacagcctggtgacagagcaagacccagtctgaaaaaaaaggcaagaagcatcagggtattgaacagtggttctcagctgaggtgtgcaaccctcttctgggcggggctgagagtagggacagcttgtaaagtgcactcagtgttatgaaatattaaggaaatgagaaaattacatactgttttccttccagtgatcattaaaagacagactgacgttctttttttttgtttttttgttttgagacggagtttcactctttcgcccaggctggagtgcagtggkgcaatctccgctcactgcaacctccgccttccgatttgaagcgattctcttgcttcagcctcctgagtagctgggattacaggcgcccgccaccatgcgcagctagtttttctatttttagtagagatggggtttcaccatgttggccaggctggtctggaactcctgaccttgtgatctgcctgcctcggtctcccaaagtgctgggattataggtgtgagccaacacgcccggccaagactgacgttcttaagaatcaagacgggcatggggagcactggcctggagtcagacccgggtagctggtcacgctggcagctctgtgtggcccccatatcctcagggcaaaacgaacagtttgcacttggtggcatctgaggcccttgagatctgtctctgggaagagcccttgtgaagggctgagccgagagcacccagtcaaggctaggcgtggcccaatggctggcaagttcgggggcctgactccctgctgggaggagtgtgcctttctctgccaggagcagcccctggtccatctgtgtcatgactcctaactgcagcccaatatccctcactggatcttctcctctccccctctgggatatggtatttgaaaaaatgactgtcttctatacaagggatccgttttagggttttcagacatctttctgtgrttgttctgggttaaaagactgagcaactacacaagtcagtaaggactggagaggtgaaagggagaayaaggccatctgtcccggtggaatgtaggggcagctggtgtggtttccctcgagatcttgtacaagaacagctgcacccacctccaacacctgcacacactggggcctctgtccccaacacatcagccatgcaccgagcccctgctccaagcatactctagaaaacagagcaaaggtggycacttgccatatcttttttccagggcaacccagatgacacttaatatgagcctctgcctgacttgccatctggctgtcctttccagagccctacttttaacacacagacagtcagagcttgagtctgacctgctggggctgtctggctgtccagtgtagaacaagggcaggagagcctgtgttttagtcacaacctgcccaacctgagcaaacctgccccagattacggaggtgtgcagcaacactaccgatggctgttgatctaagtttttcatttctggtttattttgttgtatgtaacccgtcctgattcggtttcctgcctgggcccctaggcccgttccctactcctgagtcccagagcgtggggggtaaactgccagggccagccttcccctttctggacctcatgcttcctcatctgcaaaataacggcccaggacgagcccctcatcaggttccctcccagccgtgggaacccgtgacctctcctgagtgactcagcttctgtctctcgagctgcgcttttccgtcagggcctgtggcttgggattctcctttgaaaggtcagtgcctgcttgggggtgggggcgggccagcactcactgtttgcttccccaggccagctggaggtgatcttggaccggcggctgatgcaggatgacaaccggggcctaggccaagggctcaaggacaacaagagaacctgcaaccgtttccgcctcctgctagagcggcgaaccrtgggcagtgaggtaacatctggggctgacgcccagggagccaggtctggctagtccctgggggtggccggggggtccagcctagggctcgaggagcgtagttggaggtgggcaagagagagagagtagggctgaattcctggggtggggggaggcagtctggcgttttgtgtcccatctcaygcagcctggcaccttcytctcccagcagcgctctgtcacctgtgcccctcatgttcgtctcccactttcctctgtgctgccctcctctgccctgtcccagcattctctaagcctgtgctccaaccccgctcatctcatggctttctttgccccaccagcctgactttttctccaaactggcagccatgtttaggggcttgatctttcacagcagcaggagcggtaaccgagaggtaagggtcggctctgggagcggggaactagtacragcaaggtgtagctgcgccagagcccaggtgacagagcccgccactcagtcactcrtgcatcagatagatattgagcacctgctttactgtgaggacccagagggacataagtgcagacagtgctgactctcccaggagtttactcgtgagtaggggtggcagagaagccatgtgtgtaaaaatgcaaggtagaaagggctttgtctcactgatcctgaggagcaaggtaataatgtgggctaaggagatcgaggtcaaggaggtgtcacccaggtgtggctttgatgaatggggtgtgatttgaagatatgaaccagggcacaggataggaggcaggaaagacaacaggctggggaayagcagtgagttccttagytatgctggagctatgctatccagtacggtggccagtagccctatatggctatttaaattacaactaaatcaagtaaaaaatttgctttcttattcctactgaccacacttcaagtactcaagtggctaagtggctgccgtattagaccatgtggtgtcggatatttccatccttgcagaatgccctcttggctggtgctgggctagagtgctagggggagatcagggcagacggcagagcaccttgagtgcctgctaagggatctggactttatcctggctaggaaaggtccaggctaaggaaagagctgagcaaggagggacaccrtcagaactctggtctcagcatgtcacgctgacagtacggagcaggttggatctgtgggaagggagactggaggagggtgacagcgggaggctgttcaggcaggacatgctggctgcttgaactaggccagaggctggagaagttgccggtggctatgaggacactgcccaggtgcgacggaagagggtttagcattacctgggaatgcagagggaagtgagagatgctgggcgcttggaagaagggggatgccagggacagaagtccagaatattcagcccaggcctgtgagtctgacgtccaggtgagctgctaaggagtagccctgctggcagagccccggccgcgctgggcctgagagccaggctggcactgtggatgtggcatcgctcgtgaagccgcagattacccagagcactctggattggaggtccgtgctccatggtgaggcctgcgtctgcctggctgccatcctccctgcactgtggatccatgtgtgaggggagacatggctgatgggagtgggttgctcatgatagtgttatgtgagcaaggaactaaaaagtagagaagaaacagcttagtgaagtagccctctgcgttaggggagacggcaaatgtccacacttgaagggttagcggaacctcgcctggagccaggcgtgcccttgagtcyaggcacaccaggaaaggtctttccaaaacaactgacctgggtgtgcttttatcctgcctcgtcctctcccctcagcctggctttggtccctcaccaatatctcgggtcaattttgcaggtccaagatagccactctaccagctacccatccctcctcagccacctgacctccatgtacctgaacgccccggcgctcgctctgcctgtagccaggatgcagctcccaggccctggtctgcgctcatttcatcctctggcttcctcactgccctgtgacttccacctgctcaacctacgtacgctccaggctgaggtgagtgtccctcagcgtgacatgctgagagcagagttctgatggtgtccctccctgctcagctccttccttagcctccaggatgaggtccagaccccttagcaggtattcggctccaaacctccaggaccaggttttggcctttccttacccacacgcctccctgtgccagcactgcctctgggcagaggcgctgctgcatctcygatctctgaaagccctgcgcccacttccctgggcactgtctgtcatccaggaggacaccctaccctcggcggagaccgcactcatcttacaccgcaagggttttgactgcggcctggaggccaagaacttgggcttcaactgcaccacaagccaaggcaaggtgagtagggtggggaaacagagcacctaggaatggcaggcatgagcttggtaagactgggctgagattcggtgacaggctgggagaagaaagtgtcactccagggctttctggagagaaggggggaagctgtagacatgttttcagagctccggaggcctggcagggggagttccagacaaggtagatcgcttgagaacttttgttccctgagcagggacctctatcaagcaaagtggaaaacaccagaaatagaaaaccagaacccatcctgttgttactttgtaagctcatatcagccggcactgataaatgtccccgggtgccaggtcctctgctgggctccagtgtttcagaagtgaaccaagacatggtcactgttttcacagagctcacagctcagtggaacggttcttacccrgagatctgtaggcaggctttagggttgagcaaatctcagcaagcccgtgagactggatgcacactcatgtgtaagaaggcatggtgttgctgagaggggccagccggaactggagtgcagtggcgtgatcgcagctcactgcaacccccgcctcctggttcaagtgatcctcctgcctcagcctcccgagtagctgggattacaggcgcctgcccccacgcccagctaatttttatattgttagtagagacggggtttcgccatgttggccaggctggtctcgaactcctgacctcaggtgatccacccgccttggcctcccaaagtgctgggattacaggtgtgagccactgcccctggctgagattcttaaagaggtaccaaattgtagatgaacagccacattctttagtgtctcggcacctagcacaaccctgccccttctctgctctccacaggtagccctgggcagccttttccatggcctggatgtggtattccttcagccaacctccttgacgttactgtaccctctggcctccccgtccaacagcactgacgtctatttggagcccatggagattgctacctttcgcctccgcttgggttagggcttcttgtggcctgaagagaaagttcattcacagagactgcctcttaacatgaagatcattggacaagccacacgggtatcccatcccgatctgcctcccagaactgtgacacactgggctctgccctcattttctgtttattgctgctgctgtgttttcggcgcaacccacaaacccagtgatgggtaaatagggcagacgccagtgagatcagggagagaaggcccttggtcagagtgggcagtgccaggctctgctttgggttgtgagtggacacccaactgggcacaggctcaggcacccatcctttttccaaacagggatatagaagwggtggaagcagacagaagaggtaagggaggctaagtgggtaacagcccagcatcagggtcactgtggcaacagcaggctctaggggaatcctgtggttatgtagagactccatgtcctggtgtgatgagcaggatcagagtgactctgggaggacaggggtggggacccagagttagcagtggggatggagcagtagaaggaatcactrtttctcctaggagtctgaaggcctcgctgctttctgtgatggctttgcagtaagtgccgcctggcctgcatgcattggctaacaggctgcagaatggcaggaaggactcgctagagattgtcatggccagagatcataggtcacttcaggtagcaagacccctggcaaactgggcacttggcctatgtactgatttgtgggatggtggcaggggtgtggggtccttcaccctgcctgaattctctttggcttctgtgctctgtatgctgctgtccccaagrgctctttcttattatggcagggagtggggattggtcctactttctttctctggaaaggaaagcctccaagactccatgtgcttgggcagcttgagaaggcgttcagcaccacgcctagcaggcagaccttgaagcctcacctttagtctatctgcagaggtattcagttcytggcacaggggactaggggcatgtagagtatatgaggaggcagtatggctgtgcaggagccttcatttcagcttcaattaatagggaagaatttatgatagctctatagatgctgaaaaggtatttcgtaagatttaaaatccatcccttattaamactcttagtaaattaagtctggaaagaaacaccctaatctagataaaggtctgtttcagaaaccaacagtgatggcattctaaagagtcagacgccacaggcattcccattaaagtcagaaactagccaagggcaagctattattcagcagtgtcccggcactactaacccctgcaacaagccagatgaggaacataaggaagaattataattgtcattatttgtagacaataaaactgcctacctgtaaaacctaagaatcaactgaagacctgttaagagtattctgtaagtcaacccaatgatacacatcatgttcctgtccacatactggttttccccaaatcagctgataaattcagtgtaattccaatgagattgaaactttggaattgacagttctaaagtgcatttgggagagtgaatgtgtgagaacactaagaccactctgaacgatgataatgagttggggggtggactgctcgggggtgatcctgccagattcccagaggattctcacsccaccattacctcactcagtgtgacctggagggggtcagacagacgggagagtccagaaacagacccagggctacaggaatttagtatatggtaagagggatgttttaagtggggaaaaaggtggattatttaataaacagcacttttagacaactagctatcaaagctagatctcagctgggtgcgatggctcacgcctgtaatcccggcactttgggaggccaaggtgggtggatcacttgaggtcaggagttcgagaccagcctggccaagatggcgaaaccctgtgtctactaaaaatacaaaaactagccaggaatggtggcgcgcgcctgtaatcccagttacttaggaggctgaggcaggagaatcacatcaacctgggaggcggaggttgcagtgagcttagatcatgccaccatgccactgcactccagcctgggtgacacagccaaaaaaaaaaccactaagttagatctctacctcacagtgtccatacaaattagttccagagggaagatataccacaaaattactcaaaaatttttatacctctggtgtgggacggtcttttctaaactttaacatgagacttaaaagatataataagggaaaagataagcagatttcgcaaccaaaaaatatcgaaagtctctgtgtgatggaaaacatcaaggttaaaacacaaatgacagatatggaagaaaatatttgcagcacataaaaaaatcaacgagtacaattactttaggagaaaagcttgcttcagggtccttagagaaagtcactggggcctgccaagctgccacctaaagacaagagtgagagggctgagttcttccaggtcatcagagttgttgctgcccgtattaggccacacagtggaaccccatttatatcatagcagaagaaataggattatcaatgtgaactgcttagcatggtgcctggtatatacgagagctccacaaatgtgagctataatcctactagtaaaggatgctaagcagttccactgtggcaggtgtcatttgctagtagaatttgtaatcaaacaataggaggggaatctgtgaacgcctagaaaatgagcagaataaaggatattatctttggaagtcttagatgtgcaatgaaattatttgtctgacagaaacgaatgctgaattctatttacttaagcctttaaaatgacttaaggcagtccgggcacggtggctcatgactgtaatcccagcaccttgggaggccaaggtgggtggaccacctgagctcaggagttggagaccagcctggacaacatggcgaaaccccatctctaccaaaaaaatacaaaaatgagccgggcgtggtggtgtgtgcctgtaatcccagctactcggtaggctgaggcaggagaatcacttgaacctaggaggcagaggttgctgtgagccaagattgcgccattgtactccagcctgggtgacagagcgagactctgtctcaaaaacaaaaaaacaaaaaaaaaaaacataaaatgacttaaggcagcatggctcaaggtgtgattcagaatcaccagaactgccattgaaagtacaggtttctgttctgactagggcttcttcagcctggaggctgcagtgcagatgcgtagggcagagccacagctgccctgagactgctgtgtcataggagataggagcaagaaacaaaagctgacttcagtgcacagggggataaaggcagattcctgggtacaacctttgaactggtttctgggagtagaggccaaataatttgcatttttaacaagctcccaggtgattcttgtgcatgcataatttggaaatggcccaacttttaaagcaagcagcaaccctttaccacagagctgtggtactgaggcctcacggtttgtttgtttgttttttttttttttgagacagagtcttgccttgttgcccaggatagagtgcagtggcacaatctcggctcactgcaacctccgcctcctgggttcaagcaattctcatgcctcagcctcccaagtagctgggactataggcgtgcaccaccatgcctggctaatttttgtatttttagtagagacaggttttcaccatgttggccagactggtcttgaactcctgacctcaagtgatccgcctgtctcggcctcccaaagtgctgggattacaggcgtgagccactgcgcccggccagcctcacagttctgagggttaccatcaaaatgaaccaggacatgacagaagccatttcaaccactggagacggatcggattctattcctacatttacttggaaccatccagctttcatgaagaaggaagggctgtatggccagttggaaccacagagagaaaggctccagttgaaccacttaagagctggtcctcccatgcagggcgagccagcccagacagtgtcctcatatggcttgcctcagggtaggtaaaacataaaacctcgaccacttgtgcagagagagcagcatctttaatttgacctgaacctgacttgcttaccttgctctgtcactggggcatctgtgcactcacggagggggaaaatcagtctaggatggtgggaatgaggcttaccatccacaatagagatctctgaacaaaatctttgttcttccctaacaaaaaagtgtgtgaaggacaaacacttcaagggctcattctcattctcattctcatagtgagaagagataagacagagaccagatccttcgcaacaaccctcaattttacttagggtcagtgagaaatcaattcagatggtaacagtacccaggaccagctgggtctgcagttggctcctgactcctgacattctggctcctgactttggacctccctagttgagaataaacctgaactaaaaatccatgtagttaggtagtctgggcacaggaaaccaaagtggggttggagatgcggactctgtcattctgaatgtgacagagttgaagatttgagacacagcattgagtgtggagacctagagaaggcccctcagtggagtaggaaggactggggtttcccagtcagcatgcctcccgcaagtttgaatatttgtgtccctctcaaattcatactgaaacttaacctccaatgcagcatattaagaggtggggcctttagaaggtgattaggtcatgagagcttctccctcgtgaataggattaaggccctaatgaaagaggcttcacacagcctgccttttttactgtgtgaggatgcagtgaccaccttggaagcaaaaagcagccctcgctagacaccgaacctgccagcaccttcatcttggacttcctgcttctagaactgtgagaaaacgaatttctgttctttataaattacccagtctcaggtatttttgtcataacagcacagactaacatacctagagacttgcattccaactagaggcgcaagcacacctataattctgccctctcaactcctaatgccagagattgctaaataaatactaaaaatgtaaaaacaggccgggcacagcccagcactttgggaggccgaggcaggcagatcacctgaggtcaggagttccagaccagccagaccaccatggcgaaaccccatctctactaaaaaatacaaaaattagccgggtgtggtggtgggcgcctgtaatcccagctacttgggaggctgaggcacgagaatcacttgaacccaggaggcagaggttgcagtgagctgagatcttgccattgcactccagcctgggcaacagagcaagactccatctcaaaaaaaaaaaaaaaaaaaaaaaagaaagcaaaaactgtcaaactcaaaataaaggaaatcttctttgacaaagaatggagagaataatacagccattagcagaggctgaggctatacagcttgagagaagtagagactagttcaggatggtaggtgctgggacttcaaagtccacrtgggacaggtaaccaagtgtaacctaggaacgtcaagggaccagaaccagactctgagaggtacacaggcaggaaaaatgtaagttgcaaacaaaaacaggatgacatgcaagcaatctaaaaaaatactttaaaaaatatatatgtgcaatcaccaaagagctaaagatattcagtcttgcaatgagaaactgactgaaaagaagcaaataagattttacaaattatacatgctggaaatgtaaaaatacaattattgaaatatactctatgtatggtataagccctagactggaggcagatgacataaaaatttagcaggtctggaaaacaactgaggaatcacccagaatgcaccacagtgataaaagaaatataaaaaagaagctaagacagatggaggatagactgagaagctttggcataatgtttcatagcagttttagaaaaaaagactagtgagaatacagggatgagaaaacaaagacggtgaatttttcagaactgaagaaagatgtgagatctcagaatcaaagagctcattaagttccaagaaaggtacatttaaaaaaaaaggccaggccgggtgcggtggctcatgcctgtaatcccagcactttgggaggccgaggcgggtggaacatgaggtcaggagatcgagaccatcctggctaacatggtgagatcccgtcactactaaaaaaatacaaaaaaattagctgggccaggtggcaggcgcctgtagtcccagctactcaggaggctgaggcaggagaatggcgagaacccaggaggcagaggttgcagtgagccgagatcgcaccactgcactccagcctgggtgacagagcaagactccatctcaaaaaaaatagatagctgggcgcggtggctcacccctgtaatcccagcactttgggaggccgaggcgggcggatcatggggtcaggagatcgagaccatcctggctaacatggtgaaaccttgtctctactaaaagtacaaaaaattagccgggcatggtggcgggcgcctgtagtctcagctacttgggaggctgaggcaggagaatggcatgaacccggaggcagaggttttagtgagccgagatcgcgccactgcactccagcctgggcgacagagtgagactccgtctcaaaacaacaacaacaacaacaaacaaacaaataaataaataaacaggccaggtgcagtggctcatgtctataatcccagtactttgggaggccaacgtgggcagatcacttgaggtcaggagtttgagactagcctggccaacgtggtgaaaccctgtctctactaaaaatacaaaaaaacccaaaaaccagaaaaatcaaaatgtagcggggcatgctggtgtgtgcctatagcctgtaatcccagctacttggaaggctgaggcagaagaatcgcttgaacctgggagatggaggttgcaaatagccaagatcatgccactgcacttcatcctgagcgacagagcacgactccgtctcaaaaaaattaaaacaatttaaaaaacctcgtgtagatatattgcaaattacgtaagataaaacctaaaggccaggcacggtggctcacgcctgtaattccagcactttgggaggccaaggtgggtggatcacctgaggtcaggagtttgagatcggcctggcccacatggcaaaaccctgtctgtactaaaaatacaaaaattagctgggctggtggcatgcgcctgtagtcaaagctactcaggaggctgaggcagaag

SEQ ID NO: 95562 - DNA, 110583 bp, Homo sapiens
  misc_feature (1)...(110583): n = A,T,C or G
aaagccactagtctctctgtcatcagtcagtcgcttctataaattaaaatcctacaggtacaactgagagaggggctgctgcgactgagttttcagtcctggaaaaccacactttttttttctgtctctgcaaggctttggcagtctctcctctccacccccttattaatgctggcctctgtttcacaggtacctctctacacgagcaggtgcaaattgtcactgatgggggaaacatgaaacaaactcagatgcctccagggacacgtgagaagccacacttgtttcagcctattgttctcttgagggaatgtgggccctgtgatgatgctagatctttcttttctttctgtaccttcctctcttcttccctctctccttccttccctccttctctccttccctcacaccctccctccctttcttctttcctcttttttaagaaaaactgaaaatctatttctgttttgattggagcttttgtgtgtgtgtaaaatatgttgtgtgtgtgttttttttttccacagcaactgctttttgtgtgtgtggtaaaatatgtatgaaataaactgccattttaacctttttatgagtagaactcaatggcattaattacattcaaaatgctgtacagccattgccacaatttctaaactttttcatccccccaaatggaaactatgaacccagtaagcaataattcctcattcttccctccttcctactctcagttcctgaaacctctaatctactttctgtctctatgaatttgcctattcaaaatctttcatataaatggagtcagatcgtatttgtttttttgtgttggcatatttgactcagaatgttgtagcatgtgtcagagcttcactccttttcatggccgaatgatactccactgtatggatatactactttttttttttttttttttgagatggagcctcgctctgttgcccaggctggagtgcagtggcacgatcttggctcactacaacctccacctgccaggttcaagcaattctcctgcctcagcctcccgagtagctggggttacaggaacacgccaccatgcccggctaacttttttgtatttttagtagagacagggtttcactatgttggccaggctggtctggaactcctgacttcaagtgatccacccacctcagcctcccaaactgctgggattacaggtgtgggccactgtgcccagcttattagatataccacattttgtttattcattcatctgttaatgaacatgtgggtgaaatatgtcaatttttacttgttgcaaaaacaaaacacaccttttttttttttttttttttttgagacggagtctcgctctgtgccccaggctggagtgcagtggcgcgatctcggctcactgcaagctccacctcccaggttcatgccattctcctgcctcagcctcccgagtagctgggactacaggcgtgtgccatgacacctggctaatttttgtatttttagtagagacggcgtttcaccatgttagccacgatggtctcaatgtcctgacctcgtgatctgcctgcctcggcctcccaaagtgctgggattacaggcatgagccaccgcgcctggccaaaacacatcattgttaaataaytcctcaggctacccttctctatgggaaaatgcagagtaaatcaacagatttttaatagcaaaatggccaaggaaaaagcaggatagagacaacgcaaagatacaaacaatctaccaaatgaataaagccactaatgttacttaggctcaaacagtatcccccaaagtgagaggctggatactcacaactcgataaagggtgacattcacctgatattgttgctgtctcacatggccttaatcatcttattgcttttgtcttcactgttcttcaattttgtgcccttctctagtgccagccattgtggtaggccctgaagaacaccctcatggagagcatattctgtagaggaagacaggcacactaatagtatcaacacaaccaatacaaatgctgactgctgttatgggaaaacctaggagggatacacaggcagatttggaggattaggtaaggctttccaacttcccaacttctccaacaacttgcagagaagttgtcctgagacctgagagatgaatgagaggtatgatttggaggcaaaggccaggaaactggaaagactataaaacaccttgaggaaatgacaggaaaatggggatgagggacagatgacatatgagaggaagcagggactcaatcggagtttggtattcaccttgaaggcaaatgggagctgctggaaggattctgtgttttttttttttttgagacagattctcactgctgcccagggtggagtgcagtggtgtgatctcagctcactgcaacctttacctcccacctggaaggtagatgttagcgtagggtggtgaaaggcttgtgcactcatcttaatcttaaatatataccttggccaggcaaggaggctcacggctgtaatcccagcacttttggaggctgaggctggcagatcgcctaaggccaggagtttgagaccagcctgggcaacatggcaaaaccccatttctactaaaaatacaaaaattacccaggcgtggtggcatgtgcctgtggtcctagctactcaggaggctgaggtgggtgaattacttgagcctgggaggtggaggttgcactgagccaagatggcrccactgcattccagtctgggcaacagaggcagaccctgtctcaaaaaataaaaataaattttaaaaaattgaaaaaatacatatctcaatgattgtatgtatataatgattttatatataaatgatttatatattactttatctatattaaatgtctatataagacagatatgtaatttccagcactccataagatttccttgggagcttcctcatctacctctgcctccaggggtaacctggtatgcactatatactctttttctcttttttttttgagatggagtcttgctctgtcgcccaggctggagtgcagtggcgtgatctcggctcactgcaagctccgcctcccaggttcacaccattctcctgcctcagcctcctgagtagctgggactacaggcgtccgccaccatgcctgactgatttttttgtattttttagtagagacagggtttcaccgtgttagccaggatggtctcaaatctcctgacctcgtgatccacccacctcggcctcccaaagtgctgggattacaggcgtgagccactgcgcccggccctatatactcttttatctacctctttttgtgctcagcatagtgtctgagcttcatctatattgtatgtaccagtagttcatcctcctattactttgtaatacagaaaaaaactgagaaaagctttgaaatggtctaaaacagattactggggccaggcatggtggctcaagcctgtaatcccagtactttgggaggccaaggcaggcagatcacctgaggtcagaagttcatgaccagcctggaccacatggtgaaaccccatctctactaaaaatacaataaattagccaggcgtggtggcacgtacctgtagtcccagctgctcgggaagctggggcaggaaaatcgcttgaacctgggaagtggaggttgcagtgagctgagatcacaccactgtactccagtctgggtgacagagcaagactccatctaagacaaacaacaaaaaaatgattactgggtgtcattgaaaaacaaggtgcccagctgtccagcttacttttctaggatgtctgattctatgaagactctaaacctttcactgtctttgagctacagaacaactatacaaactatagacacttcttgtctatagaaatgcaaattgtggccgggcacggtggctcatgcctgtaatcctaacactttgggaggccaagacaggcggatcacctgaggtcaggagttcgagaccagcctggccaacacggtgaaaccctgtctctactaaaatacaaaaagctagctgggcatgatggcgggtgcctgtaatcccagctactcgggaggctgagacgggagactctattgaacctgggagatggtggttgcggtgagccgagcttgcgccactgcactccagcctgggcggctgagtgagactccgtctcaaaaaaaaaaaaaaaaaaagaaatgcaaattgttttcagtagaatgcaattgattactaagctgtggatttcatcagttctgccagtttttgtatatatttgtagttatttcattattcctcatttgactatgtgtgtggtactttgaattttccattgaagcagttgtaatctttctggatatctcattcattaatgagttaaataaaatctctaacatttattttatatctgtattatatttgatattaaaattattcttcaacagtagtatacagttatatgaataagctgcaatttatctattcatctattggtggacatctgggttttttccctttggctattatgaataaagctgctatgagtcttttggtgaataaaggcattcattttttggggtaaatatctagaaatgggatttctggggtatagggtaggggtaaatttgatttcagtagagactgatgtttccaaagtggttgtaccattttacactcccatcaacactgtatgagagtcccatttctgcatctttgcaactaagggaattgtcagtcttttcatttcagctattctatggagtgtttaatagtatcatattttggtttcaatttaccatagaagattttcaggagggaggtaacttgaacagatttttacattttagaaaactctttctgcgtattatgtggagaatgattatttgtataccaaagttcatagcagcattattcacaatagccaaaaggtgggaataaccaagcatccatttatatggatgaatggataaacaaaatgtagtatacatgtataatggaatattatttagcctcaagaaggaagaaattctgatacatgctacaacatagatgctccttgaagacattatgctaagtgaaataagccaatcagaaaagagcaattattgtatgattcaatttatatgcggtacctcgcacttacagacagaaagtgcaatatcggctataaggggttgtgagaaacgggtaacggggagttactgtgtaacaggcagattttctatttgggataatgaaaaagttctggagatggatagtggtgatggtttcacaacaatgtgaatgtacttaatgccagtgaactgtacacttaaaaatggtgaattttatgttagatagattttatcacacacacaaagaggagggagggcgggagggaaggagagagggaaggaagtagagaggggagaagagaggaagaaaggaaagaaagtaagatctggcatcacagggcccacattcccgcgtgtcagcaataggctgaaacagaagcatggtttctcacgtgtccatggaggcatctgagtgtgtgcccactttcycggttcaatgacaatttgcacctgctcgtgtagaggggtacgggtgaaacagagaccagtattattaaggggatggagaggagagaccgccaaaacatcgcagagacacaccgtcggagccaagagaatggggtgcagacgcctggcttggcctgtgggaactggcaagtctcagctctcaaacgcccgggcttttcaacccgccacagccgggttccagctgcctacttcctttaaagccttcaccgactctaaaacaccaaaaacaaagacccaactagctccggaagcccgagatgtaaccgtagtcatctgaccctcccgtccggactctgattgggctttggagatacgcgtccctcccggcgctgtacggcgaccccgccccagcagcctgagggggcgggaacagatgtccgagtgcgacagtattggtcggcttccccaggaagcagccaatcggaataggcaagcttccggcgggaagtgagccagggcttggcgcggcggccgtggttgcggcgcgggaagtttggatcctggttccgtccgctaggagtctgcgtgcgaggtgagtaccgcgcgcgtaactacgggtcggtccgcattgatctagccctgctctggcggcccggcccggagctggaggccgctcgggttcttccgtttcctgcactggttcgcctcggcccgctgagtcctctagtctggccaacatcctgggaggacagcagatacataaatacgttcccaaatggggaaacagaggcccggggcgggggcgaactctgccaaggtctcccggggcgtcggaggccgagcatgggctaggacctggcatgttgttgcccatatactccagtgcgtaacatgatgccctgcacagagtaatcccagcccagacctctggcactactacctccgtgtccctcctgaggaacaacgaaaacactttgtactttttctgtggccttccataatcacgagctgggctactcttgtttttgagtgtctactgtgtgccatgttcytggcacccttgatcttacaactgtagctttacgatatcccagcaaagcgaagtgcttaagaatactgcatcagattgcttgggttcgaattctggctccttcacatttagctctgtgtctactgcacgttactgamacactaagtgtcttggttttcgtctgtcatatgggggaaatggtctcttctacttcctggcgtttttgttaggattaaacgacttaatatatgcaataataaatgcttcraaggctacctgttacatagtacacagtaagggttctgttatcattacccagagaagcggatgaaattgtccccattttagacatggagaatctgaagtacaaagaggttgtctccgtacagaaagagcatttggtgattaagtgctagagatacaggatttgaactaagcgcctgattttaaagtatgtcccacaacattaggctttctcctatagccctcacctgtccttaggtcacacagaactttaggtacctcatggcgtgagatggagcaggtgactgacagctccttgtgccacccatgcagataaataacactggtgtgtcactgtcaagattaagggacaggaattcgagagactgcatgagagatcagaagatgaagaagsgggtaggcaaaagtattctgtttggggaatagtaaatagaattaattaaatcaacattttgttagctgggctgcttatactgtcagacagtagcttataatctactgggaagaaatgaaatttctgggtcctgtgtcactttcaatgccactcaccatgacaggtaccttataagtatagtttacagtcctatcagtaacctggagaagtagttatttccttcgttttactgaggaaaccmagagttaaaaaatcaggaaaagtgttagatgtgcagtagaacatcatcatgctgggaagttctacacatccgcttcagracaggtggtattacctatgagcaggaagggaagggaaaaaggtaaggggaatgagtgatagtttattgttttgatttttaaatttttatctgttttttcctttttcatagtcattcctggaatgagtgagtttgtttttgtttttgtttttgggggatggagtctcgctctgtcgcccaggctggagtgcagtggcgcgatcttggctcactgcaagctccgcctcccgggttcatgccattctcctgcctcagcctcccaaatagctgggactacaggcacccaccaccacgcccagctaattttttgtatttttagtagagacggggtttcactgtgttagccaggatggtctcgatctcctgacctcgtgatccgcctgcctccgcctcccaaggtgctgggattacaggcgagccaccgcgcccggccatgagtgagattttaaatatatctgaaatgaggccaggcacagtggctcacacccataatcccagcactttgggaggatgaggcgggcgaatcacctgaggccaggagttcgagacttgcctcaccaacatggcgaaactccctctctatagtaaatacaaaattatctgggcgtggtggtgtgcgcctgtggttctagctactggggaggctgaggcacgagaatcgcttgaacccaggaggctgcagttagtcaagattgcaccactgcactccagcctgggtgacagagtgagagtccgtcagtcaatctacctgaaatgttttatgcctttaaaagagagagaatagggccgagtttaactttttaaatttggttggtgggtacatgggtgtaattctattttctgtatctttatgtaagaaatattaaaaattaaaagatatacatatatattttaatttacatatatatgtgtttttttctaagagaaaaatggatagaataaagaggtccaagataatcgtagaataatcctaggacttcagtgctgaaagcccctaagggtctccactacctgtaggataaaatctaaactcsttggcatgataccagaggcttttgagcattctgtatcgctaacacatactattctacctcagcctttgtaccactagttcatagactactcttcttcacaacctcagtcctgtctgtaaagttccacttgtccttcaatatccaattcagtgttctttgaaaagcttctctatcatttgcctgtttttccttaatctgggaagccatagtcttttaagaaaagacttgattgtcagacttatctcgttgcattgtaattatttgttgacatgtctattttctgctagtctataagctccttgaaggcagtaataatgtctttcccatctctgtacttcagtgcctaccatgatgcctggcacagagtagtcactgtagatattagctgaatgaaaaatacaagttgaagacagagagtgaaagttcttggagttatgacatatggactttgttctctggaatgacagggaactattgagtttactttctttaaaaattcccgtattttattgaaacatattctcaatgtcaagaaaaatattccagtcataatcctatctttcaaacacttgaactatttttattttccatgagtcctttccaaatttcagctataaaattagttatacagatttagctatacagatttcttaggtagctgtagccttaatgtattcataacttagtgtttttcttttttctttctttttaaacctgacacttgaggaattttttttttcttttctttttttttgagatagggctcactgcagctccagcctcccgggctcaagtgatcctcccacctcagctgggagtacaggggtgtaccaccatgcctggctaattcttgtatttgttgtagagatgggcttttgattttttgtagagatagggtctcgccgtgttgttcaggctgatctcgaactcgtaggctcaagcagtttgcccacggagtgctgggactacaggtttgagcccaccgcacctggcctgcttttttcaatattaaattatttcctggctgggcgcggtagcacatgcctatgatcccagcactttgggaagccaaggttggggattgcttgagcctgggagttcaagaccagcctgggcaacatggcaaaaccccgtctctaccaaaaaataaaataaaaatctaaataaattatttattttagtgaatcagtctttatgcttgtcatttgtcttataaattttcgcaatattcctctctctttggtttaataggtatgaaatgatgctccatgttattattagaaaaatttcacaattttttcataaatttacttagtgtctgtatattctggtgagctgttgtgtttatattccctgaacatttgttcactggaactgratgttctttatgtgtttttaatattaatcatttatctgttatttgttgctaatttttcttttcttttttctttttttgagatggagtctcatcctgttgctgaggctgaagtgcagtggcgtgatctcagctcactgtaacctccgtctcccgagttcaatccattctcctgcctcagcctcctgggtagctgggattacaggcacccgccaccacgcccggctaatttttgtatttttggtacagatggggtttcaccatgtcaggctggtctcaaactcctgaccttaggtgatctacccactttggcttcccaaagtgctgggattacaggtgtgagccactgcatccagcctaatttttcttttaaaaatatttttattggccgggcacagtggctcgcgcctgtaatcccagcactttgggaggcctaggtgggcggatcatgaggtcaggagttcgagaccagtgtggccaacatgatgaaaccctgtgtctactaaaaatacaaaaatcagctgagcatggtggcacatgcctgtaatcccagctacttgggaggctgaggcaggagaatcacttgaacccaggaggcagagattgcagtgagccgagatcacaccactccactccagcctggcgacagagcaagactgcatctcaaaaaaaaaaaaattttctttattatgacaaccaagatacatttgtaaaaatatacataatttcgctggaaaccaagagttaaagtggctcacgcctgtaatcccagcactttaggaggctgaggcaggtggatcacttaagggcaggagttcgagaccagcctggccaacagggtgaaaccccatctctttttttttgagacagagtctcactctctctcccagtctggagtgcagtggcgcaatcttggctcactgaaagctccgcctcccagcttcatgccattctcctgcctcagcctcccaagtagctgggactacaggcacctgccaccaggcccggctaattttttgtatttttagtagagaccgggtttcactgtgttagccaggatggtctcgatctcctgacctcatgatccacccacctcggcctcccaaagtgctgggattacaggcatgagccgccgtgcccagcaaaaagcccatctctactaaaatacaaaaattagctggccatggtggcccatgtctgtaatcccagctacttgtgaagctgaggcaggagaatcacttgaacctgggcagcggaggttgcagtgagcctagatcaggatcacgccattgcactccagcctgggcaacagaatgagactctgtctcaaaaaaataaaataatttaaaaaaagttacataatttaaagaatagttacaaagaaattacaaagtttagttatgcataaaaattatattgtattcatggtaaattgaagactcattataaaattatagttacacataactatcatctagatcaagaaagaaatagaatattaccaggatcccaggaccccagaagtgtatctttctgatacctcctccctatgttagggataactattgtcccaattatgtatttatttattttgagacggagttttgctcttgttgcccattctggagtgcagtggcgcgatctcggctcactgcaacctctgcttcctgggttcaagcaattctcctgcctcagcctcccaagtagcttggattacaggcgcctgccaccatggctggctaattttttctatttttagtagagacggggttacatcatgttggccaggctggtcttaaactcctgacctcaggtaatctgcctgcctcggcctcccaaagtgctgggattacaggcatgagccaccgctcctggccctattgtcccaatttttgtgataatgcttttcttgtcttcatagtttgccctgatctatacatctataaataatatagctcagttttgcctggttttgagctctgtaaatgggataatactatatgcattctactgagtctttctagtttgcgttattatgtttgtgagattcttccacgttgtagatatagtttttcttttctttttttttttttttaatagtaattttggctgggcatggtagctcacttctgtaatcccagcactttgggaggctgaggaagcaagatctcttgaggccaggagttcaagaccagtctggcaacaatgggagacttgtctctataaaaaatttaaaaaattagttgagcatgatgtcatgcacctgtagttccagattctccagaggctgaggcaggaggatcacttgagcttaggagtctgaggctgcagtgaactatgattgtgccactgcgctctagcctgagtgacagagcaagaccttgtctctaaaaaaaaatttttttaaattgtttttcttaacctcttaacagagttttacatgtatagtaccacacagccacaatgttgtatggcagatctctagaatgcgttcattttgcattactgaaactttatactttttgattaacaactccccatttcctgaaagcccctaccctggcaaccactgtgcccctctttgcttctatgagtttgcctattttagatacctcgttgcagtggaatcatgtagtatttgtcctgtgactggcttacttcactttgcttaatggcttcaaggttcatctgtgtcatctcatgttgcaggattttttttttaattttttattatttaacttaattgtattgtattttattatttttcagacagggtcttgctcagctatccaggctggagtgcagtagaatgatcgttgctcactgcagcctctaactcctgggctcagatgatccttctgcctcagcctcccgagaaggtgagactacaggagtgtaccaccatgcttggctaacttttttattttttgtagatactgggtcttgctttgttgcctaggctggtctcaaactcctgggctcaagcgatactcctgccttggcctcccaaagtgctgggattacaagcatgagccacttcatctagtcaatttttttctttttaaaggctgaatatttcattctatgcgtataccactgtaaagaaaactccatttcctctctactctgtacccatataataattcctcacttctgtcaccaaatgtgtggtgttttttttccccacaatagttcagttctttagcagacactgggtgtcctacatttagctcaggtctgacactaactgccaggtgttagtgcagaccccaaatgttaagtcctccctgtccacccgcattccagaccccccacttcagactacaagcacaagtggtaagtcctccacattcagtcacagaacagtttccttactagattatcagcttattataaacaactcagaagcagccagctggaagaaatacacaggacaaggtatgtgggaaggggtgtggcacttccatgccctctccaggcacaccagcctcccaccatctctacatgttctcaccaacctagaagctccctgagccctatccttctgggtttttacgtaggcctccttacctagacatgattgattaaataattggccattggtgattaagtcactccccagcccctttgtcctacccagaggaagttttgttttgttttttgagaaggagtctcactctrtcgcccaggctggagtgcagtggtatgatcttggctcactgcaacctctaccagctgggttcaagagattctcatgtctcagcctactgaatagctggggttataggtgtgcaccatcatgcctggctaatttttgtatttttagtagagagagcgttttgccatgttgtccaggatggtctcaaactcctgacctcaggtgatctgcccgtctcggcctcccaaagtgctgggattacaggcataagccaccacgcccggcccccagaggaaggttttattgaattaattacaaactgataggtcaaagagtgtgtatgttttaccttactatgtaatactaaattgttttcaaaagtgcttgcactcccaccaatgtattagattttccgttgctctgcatgctggctaatactttatatttacatttttattttccaatctggtatattcatgtatagtagtattttctggtagcattcatttctctgattattagtgaagatgwgtaccctgatgtgtttatgggctatttcctcttttttacagtccctttttttttttttgaggyggagtctcactctgtygcccaggctggagtgcagtggcaccatctcggctcactgcaagctccgcctcccgggttcacgccattcacctgcctcagcctcccaagtcccaagtagctgggactacaggcgcccgccaccatgcccggctaatttttttttttttttggattgttttagtagagacggggtttcactgtgttagccagggtggtctcaatctcctgacctcgtgatccacccgcctcggcctcccaaagtgctgggattacaggcgtgagccaccgcgcccagcctacagtccctttttttctgtcttctctattaagttgtctctgttttatgtacatataaacatatttatatatagttatctacatttttatatatacgtacatacacatttacataggtgtagcagatatcttctactttggctttttaagtggatttaacataattttagtcaatgactttttttatttttacatttctttaaagtgacataattgtaccccaacaatttatggggtacatagtgatattttgatacatatactgtataatgatcagatcagggtaattagcatatctatcatcttaaaacatttatcatttctttgtgttgggagcattcaatatcctccttctagctatttgaaactgtatagtacattattgttaactgtagtcatcctgtagtgctacagaacaccagaacttattcttcccatctagctgtaattttatattcttttctttcctttttttgagatgaagtttcactcttgttgcccaggctggagtgcaatggcacaatcttggctcactgcaacctctgcctcctgggttcaagcaattctcctgcctcagcctcccaagtagctaggattacaggcatgcgccaccatgcctggctaattttgcatttttagtagagacggggtttctccatgttggtcaggctgatctcaaactcctgacctcaggtgatccacccacctcggcctcccaaagtgctgggattacaggcatgagccaccacacccagccaattttgtattctttaacaaatctgcccctacccttcccagcctccagtgtcctctgttctagattttacttctatgagagcaacgatttttaggttccacatatgagtgagaacatatggtgtttaactttctgttctttattccacttaacacaatgtcctcaggttccatgttgctgtgaataacaggattttattcttttttatggctgaatagtattctgttgtataaatgtactataatttttttattcattcatcgcttgttgaacaccttggttgattccgtatcttggctattgtgaatagtgctgcagtaagcatgggggtgcagatgtctctttgatatactgacatcttttcctttggataagtgttcagtagtgggtttgctgaatcatatggtaggtctatttgtagttatttgaggaacttccatactgttctccatagtggctgtactagtttatattctcaccatcagtggaagtgtaagagttctcttttctctgcatcctcaccagcatttgttattttctgtctttttgataatagctttcttaactggggtaggatgatacttcattgtgtttttgtttttgtttttttaatttttaaaattttttgtagagacggagtcttsctgtgttgcccaagctggtcctgaactcctagcctcaagcaatcctcccgcctcagcctcctaaagtgctaggattcaaggcatgagccactgtgcctggccctaattgtggttttgatttgcactattttttttaacatcttttattgtgaattattgtatgttatatttcatagatataacttgtacgtgaatgagctaatatagtaggcctgaaactgttaccttcagaaaagcctgcttgcaaaattggtccctggctgtgtctgagaacttggcttttgaaacctttcctacactgatcaggttgttttactaatacctgttttccttctgagagtctgaaattttggtgggaggaaggtgcctaagtgaccagccctcaataaaacccctagattcagagtctctaaccagcttcttttgggcagaaacattgcacacacatagctgcattttcactgagagaacatgcactttctcaggggttagagagcattggaagcctgcacgtgaattcctacagacactacctgatgtgtttttttttcccttgctgatctggttgtgtatccttaaagtgttgatgatataataaatgttagctgtgagtacaactgtacactgagtcccatgagttcttccagcaaaatattgaacttagctgttaagttcctccagaaaaaaaaaaagctggaattttgattagaaatgcatcaagttatagatgaatttgaggagaattagcatctccatatcgtcttccaatgtgaatgtggttcatatgattgtttcctccctccttgacttctcttaacgactttcaattttcttttctttttttgagacagggtcttgctctctcacccaggctagagcaagtggtgcaatcacagcttactgcagcctcaacctcctgggctcaggtgatcctcccacctcagcctcctaagtagctgggaccataggcacatgccaccatgaccaacaaatatttgtatttttgtagagacagggttttgctgtgttgcccaggctgctctcaaactcctgggctcaagtgatctgcccaccttggcctcccaaagtgctgggattataggcatgagccactgtgcccagcccaattttctgaatagatatcaaggacataatttgttagatgtatttttaggtatatattattttctttaaattttttttgagacagggtctcactctgtcacccagactgaagtgcagtggcgtgatctcagctcaccgcaaccrccgccttccaggctcaagcaatattcctgcctcagcctcccgggtagctgggattataggcacgtgccactactgccaccacgttcagctaatttttatatatttagtagagacggggtttcaccatgttggccaggctggtctcgaactcctgacctcaaatgatccacccaccttggcctcccaaagtgctgagattacaggcatgagccactgcacccggccgggtatttaaatttttgatgtcatcttaaaaagttttctgacattttattttttgtttattgatgatatagraaaacaatttatttttgtatattgaccttgtctccagcagtcttcctaaacacactgtcttagttttctatagctgctgtaataaattaccataaacttagtggcttaaaacaacatagaggccgggaacattggctcatgcctgtaatctcagcagtttgggaggccaaggtgggagtatcgcgggagcccagaaattcgagaccagtctgggcaacacggtgagtccctgtctctgtttaaaaataacaataacacacggtagctcacacctgtaatcccagcactttgagaggccgaggcgggcaggtcacctgaggtcgggagtttgagactagcctggccaacgtggcgaaactccatctctactaaaaatacaaaaattagccaggcatggtggtacgcgcttgtaatcccagctactcaggaggctgaggtaggagaattgcttgagcccaggagacagaggttgcagtttgccgagatcgcgccactgtactccagcctgggcaacaagagagaaactcagtttcaaaataaataaataaaataaataaaaacaacaacaacatagatttattatcttatagttctgtagttcagaagtctgaatgggtttcattgggctaaagtcaaggtgttggcaggctgagttcccttctggaggctcaagggcagaatccatttccttccccttttcagcttttagagactattcgtattccttgactcttggctttcctcctccattatcaaagccagcaactttgagtcctcctgaagttgccatctttctggtctgtcatcttatttcctcttccacttaaaaagacacttgtgattgcattgggtccatctggttagtccaggataatcttcctattttaaggtcagcttattagcagtcttaattccgtatgacagtaattcacctttgtcatgtaaccaagcatattcacaacatccaaggatcaggatatagacatctttggatgggtatgggagatggggatagtggtggtggtcacattattttgcctcctgcattcacttaagatttttatttttatttttatttttatttttgagacgaagtctcgctctatcgcccaggctggagtgcagtggcgtgatctcggctcactgcaacctccgcctcccgggttcaagcgattctcctgcctcaacctcccaagtagctgggattacaggtacgcgccaccatgaccacctaatttttttcttattttttatttttagtagagacagggtttcactatgttggccaggctgatctcgaactcctgacctcgtgatccacccacctcggcctcccaaagtgctgggattacaggcttgagccactgcatccagccaagaattttaataatttaatctgaagattcttttagatgttccacacacaaaattatagcctttgtgaatattaatgattttacatctttccagttaacacgccttttatttattgttcatgatctactgctctggcttggacttccagtatatatctgataaaagtattgatagtgggcattctggaattgttcctgatctaaaaagaaaagtttcctaaacttcaccttactgtattctctctgtcaggttatagaagttcctttctattcctgtttgataagagttgtgtttttttttgttgtttatttttgaggtggagtcttgctctgccacccaggctggagtgcagtggcgcaatcttggcccactgcaacttccgcctcccggttcaagtgattctcctgtctcagcctcccaagtagctgagactagaggctgcgtcactgcgcccagctaatttttgtattttaggtagagacagggtttcaccatattggccagactggtctcgaactcctgaccttgtgatctgcccgtctcagcctcccaaagtgctgggattacaggtatgagccaccatgcccggcgtgataagagttttcattatgaatggatttcactgtgaatggatgtttgattttatcatatgcttattctagaagtcttgagacgatatggttgttcagctttaatgttgtggtgaattatattaattgatttttaaatgttgaaccacttctgagtcattttttagacaacacaacttggtctcggtattttttattttatttatttatttatccttttagacagggtctcactctgttacccaggctggagtgcagtggtgtgacttcagctcactgcagccttgatctcccaagtcatcctcccatctcagcttcccaagtagctgggactataggcaagtgtcaccatgcccagttaatttttataaatttttgtggagatgagatttaatcacactgcccaggctggtctcaatcctgggctcaagcaatcctcctgccttggcctccaaaagcgctgggattataggtgtgagtcatcatgcccgtggctcttggtgtattttatacatggctagatttactttgctaacrtattgtttgggacttttgcatctacatttatgaaaaagaattagcctggagtttttcactgakgagttgcccttacaggacttagtatcagagttatgctagcctcacagaatgagctggggagttggttctttctatattttggaatcgtttatgtaaaactggaatattttactgccataagtgcttagaagaactcacctgcgccactctggtcttgatgctatctttgtgggtagatttttgaccatcaataggacttctttaatggttataaggctattaggttttctgtttatttttgagtgagttttgataagttaatttttaaggaatgtgtccatctcatctaaattttaaaatttattgatgcaaagttgttcataacagcctaatgttatcttttaatgtctatagcatatgtaattaaatctcgtctttcaatctcttcttttttgtctttttacagaacaaacttggtttattgatcctctctattatatatctattattttttactcttaaaaatttttttaaaaatctatttatttatttrttttgagaccggtttatgaaactggctaatttttgtatttttggtagagatgaggtttcaccatgttgccaaggctggtcttgaactcctggcctcaagtgatccacctgccttggcttcccaaagtgctgggattacaggcatgagccaatgcgtctgaccctcttctctttaaaactgcctcccttctattttcatcaggcttattttttcagtttcttttctaataattagggtcatccattttcttgtaactacttctttagttgcatattagatatttttatgtgtagatttccattattcagtttaaagtatatttgaatactcactatgatatcttacttgactgatggcttattcacaagtatatttcttgattttcaatacaaagggattttctagatctcattttctttattttgaaattttaaaaatctacagaaaagaaaacctacagaaaagttgaagaattagtgcagtatatcatcttcccaagtaaacaatttacattcataaaaatagttcatatattaggtaacaaggaaaacattagtaatttcataaagtagaaatattataattctgatcaccatgcaacaaaactagaaattaaaaatgaaatttataaaaaagcagaaaggcccttccatctggaaaattgaaaacaactattggatgtaaggaaaacagaaactgaaataaaggatttctgaaaattaacgaaatgaaaacacagcatatcagattcttaaaaaaaaaaaaaaggtaaggcactagtcaggggaaaatttataatcttcagtacatattataaatgaagaaagggaaataatgaaataaattccaaacttagaaagttaggaaaagaaaaacaagtaaatcgaaagcacaagagaataaataataaagataaaaagagaaattagtaagagaacaggaaaacatctgattcaaaaattaagatttttatcttggctgggcgcagtggctcatgccagtaatcccagcactttgggaggccgaagcaggcagatcacgaggtcaggagatcaagactatcctgtccaacacggtgaaaccccgtctctactaaatacaaaaacttagccaggcgtggtggcatgcacctgtaatcccagctactcgggatgctgaggcaggagaattgcttgaacctggaaggcagagtttgcagtgagccgagatcgtgccactgcactgcagcctgggtgacagagtgagactatgtctcaaaaaaattaaaaaaaaaagatgtgtatcttgaattgtttaatgaagcaaataaattagcctaatagaaattacaaatatacagaataagaaatggtaagtggtaagtaaccactgacacaggatagtttttataacaggattaatttatgtacctttacgtaaacaaatttgaaaactaaaatgaaatggataattatgtgtgaaaatctagtttaccaaaattgactcaagtagatgttggaagttaaatagctcaatttccattgaataagtttttaaagttatgaaataactgtctcactgaaaaataaaaaacatgaggtccaaatggtttaacaggaaaattctactacatttatggagtccaaataatcctaatgctaaataaattgttttagaacgtagaaaagaaggaaaacttccaaattctttattttccaaatggcttggtattgtaaatgctgatttagttgtctgtctccagttgttgaagggctgaagtgaaataaagtaaaacatcttaaaacactttttagttcttagaccctcttttttaaagtagctttattgatatagactgcacgtatttaaagtatacaatttgttcagttttgacatacacacatcatcaccataattcagttaatgaacatatccatcactctcaaaagtttcctcatcccccttaattctgccttcttgctctcttcttgccggtcaaccacttatctggtttctgtcactgtagaataattagcatgttctaggacttttaataaatgttataatacagtgtgtattcttttgtatctcacttcttttacacagcataattattttatatcggtttttatgaagcaagtataaaacaaatatttaacataaaaattaaaggtagcacamagaaaattacagatgaatattatgtataaaaattatgtaaaagttctaaataaaatactaccaaacagaacagaatccagcactctattacaaaactattagctcatcaccaagatgtataccaggaatgcaaagatggtttaacattagaatcatcaatgtaattcaccatattaattaacctaaggagaacagtcatatatttacttttatatatgctgaaaaagcctttgacaagattcaacaccaatatatagtaaaaactcttaagaaattatattgtaatcaatacttctttttttttttttgagatggagtctcaccctgtcgcccaggctgaagtacagtagcatgacctcagctcactgcaacctccacctcccaggttcaagccattctcctgcctcagcctcccaagtcgctgggattacaggcgcccaccaccacacctggctaatttttgtatttttagtagagatgcggtttcaccatcttggccaggctggtctcaaagtcctgacctcaggtgatctgcccacctcggcctcccaaaatgctgggattacagatgtgagccaccatgcctggccaatcaatacttcttaatgatggtattctctctctctctctctgtctctgtctctcacgcacacatacacacacacgcgcgcacgcacgcacacacacacacacacacgcagagagagagagagagagagagagagagagagagagactttattcctaaatcctgtattttatctaataggaaaatactagaggcatttttactaagattgagaaaaatatagagatactcaccaactccacttgtatttaacattgtactgggggcttagccaatgcagttagataaatcaattagaggcacaagatttggaaaataaaaagtaatattgtccctacttgcaggtgatatggtagtgtgtctggaatactgcagaaaatcaataatgaaactaactaaacagaaaaggaattttataagaatatgcaaaaatcagtagtcttcatatacacaacaagtttgaatatataatgaagggtaaaatcccatttacagcaacaagaaaaagagaaaatatttaggaatttaaaaacatgtaaaacctaggtgaagaaatctttaaaacacttctgaataacaaaaatagccttaaacaaatgaaatcttttgttctaggacaggacaacaacatcataaaagtgcctaagttaatatatatatatatatatatatatatatatatatatatttaagttaatacatatacctaagttaatatataaatttaatgcaatctcaatataaatatcaacagagttctggcactagacaagttgattctaaagttcatatagaaaaataaacatataagaataggaaaacagaagagctacaaagagaaagtagacttccagatattgtaacatgttgcaaagcttctatcatgataatattgtggtatagaccaatggtatagaatggaaagtcaataattagtctcctaaacacatgaagaatttagtgtatgataaaggtagttctgaaattattagggcagagatggactctttaataaatagtgctgggacaacttgttagccacttgaaaaaacaaaattatatctatactttatatcagacacaggaataaactccaaatgaaccagaaatctaattttttttaaattacctactagaagaatacatagatgagttttctgtaacctggatgtggagaagggcaataaaagagggggaaaaattggctacattgaaaagcaaattcttgattacaaaaatgaaaaacaccataagcaaatttaaaagatagatgagaaaccaggaaaaaaatctgcaaaatacattttaaagacctactatccctagtctaaattgagagaaaaaaatactaaaatttggttaaaaaggcagaatacatgagcagatacaattttttaaaaagattcaaaaaccatccttaaatatgtgaagaaaatattcaatttcacctaaacaggaagtgtaaatttaaagctgcactgaaataccgtttctcacctatcagctctgcactaattagaaagcttcacaagaagccccattggtgaggctgtgaggaatgcaaacttgtaaaacctcctttgagggagaagwtggcaatccagcagactacacatgcatttgccctttgacccagccattccacttgtagaaatattccctaaagatacattttcttttctttctttcctttttttttgagacagggtcttgcttgttgcccaggctgaagtgcagtagtgtgatcttggctcactgcagctcaaactcccaggctcaattgatcccaccttggcctctggagtagctgggaccacaagtgcatgccaccacgccttactaatttaaaaattttttttatagagacggagtctcaccatgttgcccaggctggtcttgaactcctggactcaagcaatcctgtctctgcctcccaaattgctgggatgacaggtgtgagccaccgtgcccggccttacgttttcaacagtagggaaatatgaatgcacaaagttatttgttgcagcattatttgtaattgtaaaatatcagggaataccttaaatgtccatacaggaaatttgttggtaaatatctacacaatggagtactgtacagctgtaaagaagaatgaggaaaatctttgcaaacgggtgtagagtgatttctaacwtgaatggaaagcgtacatacagtgtgctattttttatgtaagaaagaagggaaaatatgagactctratgtctgcttattttgcaaaaagaaaaacaggaaagataaatcagaaattattgaaattgataacccacaggaagtagatggcaaaggrtggagagggaagaacacttctctgtggggaaaaacagtcttttatgtagttttaacttttagaactatgtaaatgttttatatattcaaaaatcaaatccacaagaacagtacaaacacaaactaatctaattcaaatgatgaatgtaatcaccctgaaggtgaggtgggactgaccaatcaagtaacttttgaatatagtactttaattatgtacccttaatctgaagaaagaaatgcaactgaattttgaactcttcttagtaggttttttttttttagtgacaggagtgtagcaatttgaaattacttcctatagtttcagattgaataaatgaataaatatatgatggttttttctatgaattttaagatagatggatagatcaatggatgtatagctgtagatacagaaatagatagaagtgtttatatttcctagatctgtctactaaaagggcctaggagcaatgatatgcaagtagcagatcatatctaatggccaggtcttagattttaaagattttkcctcattaaaataaatgaaggctgtttgaggaaatggtgattctatggctgaagcaggaaaagtaaatgaagaccatgaatgttgtgccaggtaataagaaagtgcctgatgggaacactttaaaggacagaggaaccaatggattaaagaagaaaacaagagacattagagtatatcttgagacaatgaaaacgaaaacacaacatgccaaaactcatggaatacagtgaaagcagtactagaaaggaaatttatagctacaaatgcttacattaaaaaagaaagatctgaaatcaacaatttaacttcacacttaaaggaacagtaaaaagaacaaaccaaacccaaagctacagaaacaaggaaataataaatattagggcagagataaacaaaacagggactagaaaagcagtagagaaattgacaaaacagaattgattctttgaaatgataaaaaaattgataaaactttagccagatggactaagaaaaaataagacaaattactaaaatcagaagtgaacaaggggacattayaactgatttacagaagtaaaaagatttataagagaatattgtgagcaaatgtatgccaacaaatttgataacataaatgaaatggataaattcctcaaaacacataaccaccaagacagaatcatgaagaaacagaaaatctgaacagacctataactagtaaggagattgagttagtaatcaggtatcacccaacaaagaaaagctcagggccagatggcctcactggtcatttctaaccaatatttaaagaagaattaagtccaattttcctcaagctcttccaattaatgatatatttgataaagggttaatacccaggatatataaagaactcctcagcactttgggaggctgccgggacgggagaatttcttgagcctaggagttggagaccagcctaggcaacatggtgaaaccctggctctacaaaaaatttaaaaatttgccaggtgtgatggtactttgctgtggtcccagctactccgtaggctgaggtgggaggaccacttgagcccgggaggtcgaggcagccgtgagctgttgcactccagcctgggtgacagagtgaaaccctgtttcaaaaaamaaaacaaaacaaaacaaaacaaaacaaaacaaaaactcatacagctcaacaaataacccatttagaaaatagagaaaggactcgaatagacacttcaccaaagaagatatacaaatggccaataagcaaatgaaaagatgcctattatcactaatcattagagaaaggcaaatcaaaaccaggagataagacctcacacctgttagaatgcctgttataaaacaaaacaacaaccagaaaataacaagtgttgctgaggatgtggagaaattaggatgtggaaaaatgggaagccctgtgcattatttatagcaatgtgaaatggtgcaaccactgtggagaacagtgtggtggttccttaaaaattaaacataaattaccatatgattcagcaattctcaaaaagatatttgtacacccatgttcataacagcattattcacaatagccaaaaggtggaagcaaccctaacgtccttgaatggataagaaaatgtggtatgtatctacagttagatattattcagccttaaaaaggaaggagcggccaggcgcggtggctcacacttgtaatcccagccctttgggaggctgagacaggcagatcacaaggtcacaggttcaagaccagcctggccaacatggtgaaaccccgtctctactaaaaatacaaaacagaaaaattagctgggcttgatggcacgcacctgtaatcccagctactcaggaggctcgggcaggagaatcacttgaacccgggaggcagaggttgcagtgagctgagattgcgccactgcaccccagcctgggcaacagagcaagactccatctcaaaaaatattaataataataaaggaaggagcctggcatggtgactcatacctgtaatcccagctactccggaggcagaggtgggaggatcattagagctcaggagattgaggctgcagcgagctctgcacacaggaaattctgacacatgtctcacaacatagataaagcttgagaacactgtgctgagtgaaataagccagtcccgaaaaggcaaatactgtatgattccacttacagtgtgaatacattatgattcccatactgtatgagtctgctgatgacaaactattgtttttttgataatctggaagtgtctctatttcttgtggcattttaaataacagctgtattgtttttaaattattatttgtttatttttttgagacagggtcttgctctgttgcccaggttagagtgcagtggtgcaatcacagctcactgcagcctcgacttcctggttgagcagtcctcccacctcagcttcccaagtagctgggacaacaggcatgcaccatcattcctggctaatcttttgtattttttgtagagatggggtttcaccatattgcccaggctggtctccaactcctgggctcaagcgatccccccgcctcagccttccaaagggctgggattacaggcatgagctactgtgtctggcctgaatgacaggtctattgaaatacattacacatataaaattcacccattaaactgtacaatccaatggctttgagtatattcacagttatgcaaccatcaccgcaatcaatgttggaacattttcatcagcccacagagaaatttgcataccccttgccatcatccccaaatcctctcatctttcccaaccctaggcaatcagtagtctacactgtatccatggatatgtctattcttatacatttcatataaatggaatcatacactagttcatcttttgtggctggattctttcacttaacataatggtttcaaggctcgtcattactgtagcatttatcagtactatatttttttgtgtggccaaataacattttgttgaatggatatacacattttatttatccattcatcacttgatggacatttgagtggtttctgaatttrgctattgtgaataatgctcctgtgaacaatttgtgtacaagtatttattttgagtacccatttttcactctttcgcatatatagctaggagtgaaattgctgggttacatggtgatatggtttgcctgtgtccccattgaaatctcatcttgaactgtggctcccataatccccatgtgtcatgggagggacctcgtgggaggtaattgaatcatgggtttttcccatgctgttcttgtgagagtgaataagtctcacgagagctgatggttttataaaaggcagttcccctgcacacactttcttgcctgccaccatataagatgtgcctttgcccctcctttgccttctgccatgattgtgaggcctccccagccatgtggaactgagtccattaaacctctttttctttataaattacccactctcaggtgtttcttcatagcagtatgaaaatggactagaacacgtggtgactatgtttcgttttttgaggtactgcttgactgttttccaaagtggctgtgccattttagagtcctaccagcagtgtatgagggttctgatttccccacattgttgccaacacttatctgttgcttttattatagctactttttaaaaataacagctttattgagatataattcatataccatgaaattcacctttaaaaacctagtgtacaattcactgcccttgatttgtgaaagatattttttctgggaaaagaattctgggttaatttctatcagcacatcgaagatatcattccactgtcttttgattttcatttttgctaaagagaaatcaattttttgtccatatggtacactgatatatttgggtgtggatttctttttatctctgcttggaawtttttggsyttctcaaatctgaaggttagtgtctttaattagtcctggaaaagtcccagctgwtatcttttcaaatattaattcttccctattttctcttctttctggaactctggctagatttatgttagactttctactctgtcttccatgtctcctaacttctcatattttccatctgttttctctatctctctgtgtgtgcatctattaagtcaaaaactatgaagggtctgagattttaccctacatttatagctatatttayctttagccacttttctgaagttctaattatctattgttatgactgattttctttgggttgtattggtatattatcaagttgtctacatataatgataatctcatctcttctagtatttcctttttcgaatatttttgcattggcaagagcatccaatatgggagtgaaaatgagagaacaatattgtttttgctgttgtttttaatggattcacccctagtgtaaaatatatggtatttgttggttctagattttaaacacttgtaattttgtgttttaatgtgtttgttagacatggtttgagttttattaggtgccttttcaaaaatgcattgataatacatactgtgtgattctatatatatgaatcaagaagtttaagaaaccatgaacgaagagaacatatgacataaaattctgtcaaaaatctctctttgtctagaaattgtgtttgatgtttaattttatcagagaacagaaagttgcttgccccagtgccccagttaaggtaaagctgaggttcataaatacctcaacttaaaaaaatacaaaaagtagattttttgatcgttcttagttaggctcaccacctttgccccagggaaagtaactcctcccctttgaacagtcactgagtgaggcttacagagcgacgctctgtttttcaggaaccaccccctaaaatctccacttttagcagaagactggaaacagaaacatctaaatgttacttggcactgaatgtcttggagtagtctttttggcagtctatcccttgatagactgaaatagccatctttgacaacaaaatgaataaaaagtaaggtttgacctagtcttaattttgatagatccccaaccagtaactttagtgtcacttatttcaaagaaaaggcactctttttttctgctgtgtttttctccatcccatgtctctctctctctctctyttttttttaaaggtttattgtgtttacttttattctttttttatttttgagacagggtctctgttgcccaggctggagtgcagtggggtgatcatggctcactgaaacctcgacctcccgggctcaaatgatccttcccacctcagcctcctgagtaactgggactacaggcaygtgccacctcactcagctaatttttgtgtttttttgtagagacaggtcgtactttgttgcccaggctgctctgcagctcctgggctcaagcgatcctcccgctttggcttcccaaagtgctagtattacaagtgtgagccgccgtgcccagcctatttgaaaaattcttaatagccagttttaaaggtaatgcttgaagcttacatttcctgtgactttttttttttttttttttaaacacagggtctcactgtcaccccagctggagcagtggcacagaattgctcactgcagcctcgaactcctgggctcaagggatactcccacctcagcctccctgagtagytgggactgtaggtgtgtgccaccatgcctggctaaagatgggatctccctgtgttgcccaggctagtctcaaactcctgggctcaagccatccccctgcctcagcctcccaaagtgctgggattataggcgygagccaccgctcctggcctgcttatttatattcttttgtaatggcatgataacttctttcatatatgtaggagaaaattttaatcattttccagattgaacttgtgattcttgtggtcattctaattcataggtttatttttttagtttctggttgctcattgcacccagaaattgttcctttttttaatattgtgaaacttcactagcctcaatttatttgttttcagttaatttttctcctttatcactggtctttgttattgtggatgaacaattttttttaagagatggggtctcacagtgttgcccaggctatagtgcagtggctgtttacaggtgtgatcatagtgcactacagccctgaactcctgggctcatgcaatcctcctgcctcagcctcctgagtagctgagactacaggcatgttggtgaacaattttctttttgtgtccaacaattgtatcgatattttgatggagtatgtacagaagagacacccttatggttcttagtactcaccaacttcctgaaagyattcccactgaggattttgagtaagaaaattatgtactcattaccatacttcagaatatgattctggctggagggtgctacctcgtgaggaataaccaaagagcagtgcattttaaaagcaggaagaggtcccctggagttaaggttgactgcatgctagctgtgaatccatagtgtaatcactacagttataaaatagttaatcaaacaattgtactcctgggatggctaagtagacatataaaaccatgctgtggagtaatgtaggaaatctcttattaaaatatcatggctagttttgatccaaaaataagtaagttatggaaggaatgtgggaaaagggtaagtaatgatgccatagaccactttgttctgcttagtgtcattaagactgaagatctgtgtacctctgcctccttgtcagtagtctactttgttgatgttgaaattcttagagggcaatagtctgacttcactctttatcacttcgtatttattcatgtgggaaagactcccacattgtacaggaccttgaagaggggacgcctcaacaaaagatcaaggcttttattttttatttatttatttattttttgagacagagtctagctctgtcaccaggctggagtgcagtggcacaatctcggttcactgcaacctctgcctcccgggttcaagcaattatcctgcctcagcttcccaagtaactgggattacaggcacatgccaccatgcccagctaattttgtatttttagtagagacagggattcaccatattggccaggttggtcttgatctcctgacctcatgatccgcccacctcggccttccaaagtgctgggattacaggcgtgagccaccgtgcccagccaagatcaatacttttaaactggattccaaatggtgaagtgccctaggaaatgcagagattaaggkcttaaaatatkctccattaaaaagaatcagggaggctgggcgcggtggctcacacctgcaatcccagcactttgggaggcggaggcaggaggatcccttgagcacaggagttcgaggccagcctgggaaacatggtgaaaccccatctctaccaaaaatacaaaaaaattagtggggcatggtggtgtgcacctgtggtccagctgtgtgggagggtgaggtgggaggaacacttgagctggggaggcggaggctgcagtgagtcaccactgcactccagcctgggcaacaaagtgagaccctgtctcaaaaaagaaaaagaaaacaagaattagggatgcttgacgaaatggccgattccaaatctggtgcaaaaaaatgcataaggtatgcctggaacatcttttgagaggaaagaagctctcaatgactcataaggttaagtcataaggactgaagagcccgcctgaaaagactcccactggccaaacatgaatcaatttgagaatcaataaggatgatcactgtattggattgaaacacacctaatatgtttaatccatgagttcataatgatactgaaaaaaaattcatcactatttgaaggtggtgaaagaatgaatatcattttttatttattattgttaatgtatgtaagggatacaagtgtagacttcttttttgttgttttttgaaacagggtcttgctctgttgcccaggctggagtgcagtggcacaatctcagctcactgcaatatctgcctcctaggctcaagcagtcctcccacctcagcctcctgagtagcagggaccacaggcccgcaccaccatgccaggctaatttttttatagttctttagagacagggttttgccatgttgcccagcctggtctcaaactcctgggctcaagcgatccgctcacctcagcctcctaaagtgctgggtctatgggcatgagccactgctgccagccacgtgaatatamtgtatagtagtgaagtatgggcttttagtgtactgcatcattattttgaaacttacgataaaagtcttacagctggctacgcatggctcacacctgtaatcctagcactttggcaggctgaggtgggagaatgacttgagctcaggagttcgagaccagcctagtcaacatggtgagaccctgtctttaccaaacatttaaaaattagctgggttgtggtagtgtacacctgtagtcccagataactcaggaagctgaggtgggaggatcacttgagcccaagaggtcgaggctgcagtgagctgtgattgagccagtgtactccagcctgggcaacagatcaagaccctgtctcagaaagaaaacaaacaaacaaaaagtattcctgctaatgagtgaaagaagtaataacagaatcgaaatgtcaccattttggaggtggacttccaaaatggtggagtaaggacctcagggtgtatgtatagctgaaacaatattggatgagttgataattgttgaatctgggtgataggtatgtagggattcattccttccatctacttttttgggggtaataattaagatataattcacatgccartgtgaattattcaatgtttattaaataactagctatattacctaaagcatgttaaagagggaaaagaagcagaaataattccttctggagaaagtgggacaaaagctgtattatgatcatgcttataaacatgaagatttctcaattggatgtaacttagtttcttctaaattctgmttttcactgttatctaaagtcaagatggttgatagatatgggttaatgagtggaacacggcttatgcgaaacttcatatttctagaaatatcatctagtgttaaccctgcctcctaagatatatgctataaaataaaaatagatgtctagtaaaggtagggaaaagggtttatggggttataactatcagctaaagtgaggatttttttaactatgcatggattacagctaggatcttcctttagccccagtaattttaaggtggtttaagctgtttgttatcctgggctatagctcagcgttaccacagcttgttacacagagatataaatgtgcttggtaaacgtattctttcaggttgaaactagatgattatgaagcatagtatcttgctggtaaacctttgctctcattggtggtggtgttcctcctttccccagttctgcccttgtgcagaattcagttattcatttgttctttgggctttccgtgtgctttgatcatttcctcccacctcgctcccttccagctttcatttatccttccaggccaggtcccatttttctaaaagccctttcctaataatcccctccctaatgtcttttgtacttattttagcattgtggaggaagagasggggaacstggttattctgttattcaagtgagccttcagttagttgaagattatatatttcaagtgtcactagttgtaaatgtcaaaacagtctattgaccaaaaaaaaaaaaaaaaaaaaaaaaaagtcctattactctgggcacagttggaacaatgcctgtttgaatcaagtccttcctcccctcaaaaaacattgtgattaatgcaaagtacctaactccactgatttctttttccctcactttttaggattatggctgctgttcctcaaaataatctacaggagcaactagaacgtcactcagccagaacacttaataataaattaagtctttcaaaaccaaaattttcgtaagtgttttgactggtttgctgtcacataggcactaacttaccacattgtacacatgagatatcttctctttaaactcscccattgtacagatgaggaaatgaagctgagagattcattgattttcccactttgccaattaatggtagagtatgttttagcagcaccaggtgagattgtgtctcatctttgcatggttcctggcacataatatttgctcaataaagatttgttgagtaaatgaataattgatcttgtaaatttgggcaaataagtgttttttaagttttggggggtttttttgtttgttttgttttgttttgttttttcttttgagacggagtctcgctctgtcgcacaggctggagtgcagtggcgcgatcttggctcactgcaagctccgcctcctgggttcacgccattctcctgcctcagcctcccgagtagctgggactacaggcacctgccaccacgcctggctaatttttttttgtattttttagagacggtttcaccttgttagccaggatggtctcgatctcctgacctcatgatccacctgcctcggcctcccaaagtgctgggattacatgcatgagccaccgtgcccagcctttttttttttttcttttttgagacggagtttcgctcttcttgcccaggctggagtgccatggcacaatcttagctcaccgcaacctccgtcttccgggttcaagtgattctcctgcctcagcctcccaagtagctgggattacaggcatgcaccaccatgcctggctaattttgtatttttagtagagacaggatttgtccatgttgggcagactggtctcaaactcctgacctcaagtgatccgcccaccttggcctcccaaagtgctgggattacaggcgtgagccaccacgcccggccaattattttaatataattttatatactttcgaagaacagtttataaggaaactacagctctccagttctgcctctcctctaagctatactccagactccttctaatgatatctaataataatttatattataagtgatgcttttaccaggttgtagactttgttctgggtgcctggctttgaagtcaccactgactttgagatcattaaatccagcagatagccacgattcctgcgtcttttacttgtcctgcagattttaacagagttagcagtttttaactctttttcccctttaagttcttatcagagtagcaaaaagtagccatatttgaatctcttccgtttttcttttttctttttttttttttgagacagtctcgctctgtcacccaggctggagtgcggcagtatagtctcggctcactgtaacctccacctcctgggttcaagctattctcctgcctcagccttctgactagctagggcttcaggcatacaccactatgcccggctaattttttgtgtttttattagaggtggggtttcaccatgttggccaggctggtctcgaactcctgacctcaagcattccacctgcctcggcctcccaaagtgctgggattacaggcatgagccactgcacccggcctcttccctttttcatttatgctgtcaccccgctctggagatgctattaactaaggactactagcctgagaaataaagtagtgggaatgacctctcaaagccaaataattagcctctgaatgggaaggaccagagaacgaatacaatttaagttacctgataaatttaaaatcgagagagatggattctttgctcagttgggatacaattaatgtaacctgtgtgaattagtttaaaaaattagttttgtagagttggggggtttcttaaaatggatccatctaatctagtttttccattatttttcagaggtttcacttttaaaaagaaaacatcttcagataacaatgtatctgtaactaatgtgtcagtagcaaaaacacctgtattaagaaataaagatgttaatgttaccgaagacttttccttcagtgaacctctacccaacaccacaaatcagcaaagggtcaaggacttctttaaaaatgctccagcaggacaggaaacacagagaggtggatcaaaatcattattgccagatttcttgcagactccgaaggaagttgtatgcactacccaaaacacaccaactgtaaagaaatcccgggatactgctctcaagaaattagratttagttcttcaccagattctttaagtaccatcaatgattgggatgatatggatgactttgatacttctgagacttcaaaatcatttgttacaccaccccaaagtcactttgtaagagtaagcactgctcagaaatcaaaaaagggtaagagaaacttttttaaagcacagctttatacaacaaacacagtaaagactgatttgcctccaccctcctctgaaagcgagcaaatagatttgactgaggaacagaaggatgactcagaatggttaagcagcgatgtgatttgcatcgatgatggccccattgctgaagtgcatataaatgaagatgctcargaaagtgactctctgaaaactcatttggaagatgaaagaggtaacaattattttatcttcattttagtatgttcattgtacttttttattcaaagctagccattgggaatagtcatgaatatatagagcttttgtccttaaggttgttagggtctttagtggtgctttttgaataatctgttggccacatttttgaggcaggacgtactgatgaaatggaaggttttagtctgctaatatagtttccaggatagctctgtgattttatacatgaagaaaatacaggagtttccccttgtccacagctttgcattctctgaggtttcagttacccgcagccggctgaggtctgaaaatattgcatcacttctcttgcgctttgggaccattattaagaaaacacaagccctgcaataccgcgacagtcaatctgataactgagaccactactaagtgattaacagcaacccaggtggacagatcaggtcggggcaagattttatcacactatactcaaaacagcttgaaactgaacacttatgaattaatttatttctgggattttccatttacatcacaatgcctacatcattcacctctcttcatctcatcatataggcattttttatcatcttatatctttacaaaggaagggtgagtagagtaagatattttgagcaagggagaccacagtcaaataacttttattgcagaatattgttataattgtgctatttcattagttgttcaccttttgctgtgcttaattaataaattaaactctatcataggtatgtatgtataggaaaacacatagtacttatcgggtttgatactatccgagatttcaggcatccaccggggtcttgtcacatatttcctgaagataagggggttgctgccgtaagatccatagaggttaaaatggtggttagtggtaaattggaaaatgaaactaagcctttctactgtaattcctttatggcttgttgccacctaatattgatgtataatgtgctctaattgcactattaaagtattataaattacattcaaagtttttcctggctagatcttgtaattatttaatgtccaaaattgagtaactgagattacccacatggggaagtaactcaccttatgaagcagttgcaaatatgagagtaaaatttttaaacccctgaatcccattaaggttactctagggtgagagagcactgaaaagtgattgacgataagcaaaactatagtctcatcaatgatgcctctgtttctgaagggaaaatttgttaaaagatagacagcaacaatttgggttgtgttttcccacatagtccaaaagagagacttaaataactgggaaactttgtgttaaagatgatttgtacaagcagccgtgtttgtgttattatcagacttatctgttgcactttacccttatttaaatatgagtgaaaagttaaaaactagaaacgtcaatagcaaatacgtgtttcgtaattaaccagagacagacatgaaaatccctaagcaaatcttcggcctcagtcgagcattcactggacttaatccacttgactcaatagtaatcatttatgaataaataagccagcattagcatgtaaagggagaggatccatacaaagtggtgtgattgtttgtgacttgccagaagcactcattcttaatcgctcatgccctgttctttctgtctcattagtggttaacaaatctatgtttatcaactgttttactgtagataatagcgaaaagwagaagaatttggaagaagctgaattacattcaactgagaaagttccatgtattgaatttgatgatgatgattatgatacggattttgttccaccttctccagaagaaattatttctgcttcttcttcctcttcaaaatgccttaggtaaactagctaaataattagcattattatttgtttctgggatactttaaattgtttaatttagtttataatatcatttctatataaaagtattttgtgctttctacaattattttacattcaagtgaaagcctcaaaaaaaaaccctgtttatacatttaattggttgcattctaaagatgaagtcccattatgattaattacatgaaacttcaaacaattttaggtagctgatttttttttttttttgagacagtctcrctctgtcacccaggctggagtgaagtggtatgatcttggctcactgcagcctccacctcccgggttcaagtgattcttgtgcctcagcctcccaggtagctggaactacaggtgcacaccaccatgcctggctaattttttgtattttcagtagagacgaggttttgccatgttgcccaggctagtcttgaacccctgagctcaggcaatccgcccgccttggcctcccaaagtgctaggattacaggcataagccaccttgcctggccttatatagttgattttgacataaggaatatatttctaaaaatattatrtttccaaacctgacctgaaatgacacaaagctaacccattatatgggaagtgaattaggacattagtactttttaaaaaaatcctacaggatagaattggccattgtatttgttattcactcaattttagcaaattggtgacatgattattgttaattggtagtattacgagaaaaatagatactccacacgactcatcaacagcttaaattgctaagtgtcaatgttaccttcgtcctcatcccagtctcactctcagaccagttgagtggtagagtatagtatatactaaactgagcaaaagtttatatagagtctcaattctaaaccagcattctcatttaccaggtgaaacagctgaggcccagggaggagcaaggaattgcccaggttgatacaatgaatgacaaatggactcagatccagtgtagtgccttccctggtgtcatactgattccttgttgaatgcctggcttttttctttactcattaaaaatgtgtgttacgcaaataatataatcattttaacaaggattctaaataagaaggaaggagcactgctgggtgcggtggcatggtagtggcctgtagtcccatctactcaggaggctgaggcaggaggatcccttaagcccaggagttcaaggctgtagtatgctgtgattatgcctgtgagtaaccattgcactccagcctgggcaacatagcgagaccctcatctctaaaaaattaaaaagagagagagaaggaatactagtagtcccacaattctgactgttttctttatccatcttcagttttgatacatgtgtgtttgatttctgcattgttgtaatcaacatgtaattataattttatattctactttatttctcttagcattatttctaaatcattttccaattgctacatatttaattccttttaatggctacataatttatcaaattgtcatatcataaataaatttacctagagtcttagcaattaaaaaagcttgttttacaaagtatttccaaggtagactctctttgtacatttcccattgtaacttagtatacatatgtgtatatattataaaactgaaatagaattttcacaatattttttgtgcaatgcacagcttaaattctatgctacattttatttcagttttaaaaaatactggttgtaacctctgaatttcagaagtcaagtggtcagacagtatataacagagaagagagacctgtttttcaaactcctcttttccaaaacctctgtagctggccctcaagattctccatcttctggccacaatttacctttttcagctttatctccacttatgcccttgcaataacccagtggttttaatgagtcaaaccaacaatctagaaagcatatcattttctttaattataatgttattgtttaaaaaataatattaaaaagttacactgttttgatttagttagaaagttgcattccaaaattattctttaggaaaatacagttgattcccagatgtcaagcaaatagaaatgtcctttttaaaatctttctttcatagtctgacactttccccatacttgtcattcagtttgcttaaatcttatctccttggcaaagccttctaaagttccaaaaaatgttacctttctttggatttccacagtatcctctctttaacactcattcagtactaatttattttgttatwtgtaaagtattttttctatgtaatcagactgaccaggtttatatgttaatatgtttttgtataatctgtgtggtgaggtaattatatatgcagacacacaaaaacacatgtacatatatttgcataataagagaagtccagaaaaagtgctttgaaatctcagaaaaaagagacattaataatcacttgctggagaagtaatgctttggctggggctagaagaacaggtgtgatttgggtacgaagagattggaatggcaggttttccaaattgagaggatcagtggcaaaatccccaaaataggcaatgcagggcttatatgaagaatgtaagtggtacagtatgactgaagatttgtgttactgaaaggacataatcggagataatgttgaaaagggctctttctggacaactttgaggaccagctaaagaagttttataattgaggaaatttaaaaaactacttctcttttctgttatatattgtctgatcagtggtagaaamatattaagggtttcamaattatacatttattgagtctagcctatagtatgattggcttaacattttttttatttgcagtacgttaaaggaccttgacacctctgacagaaaagaggatgttcttagcacatcaaaagatcttttgtcaaaacctgagaaaatgagtatgcaggagctgaatccagaaaccagcacagactgtgacggtacaagcaatattttagacataccatgtatttcaactacttacttttgaaaacaacgtaacacaaagattgtgttttgaacctgtggctgtatgttataaaatggcagatttgtagtttcttttcttctaatgtcataaccttgtttactggttagccagcatttgcctgaacaactcrtgaactcatgctctcacaagggcgttcattccccattttgaaaatgctacttgttagaaatcatctctcatactgagccaagatctgcaactttaattctaggaggtttttaaatttttatttacaaatgagaacttccacaaaatcctgtgtttcagaaacacggaccacagagcgtaatctcatcataatagagtttccctccccctccttgactaaatattattaggtcttttaactctccttgctagaaattgctttcttgacctttcatcctccggttctcccttgtatatactctgagtctaggtctgggtcttgatgttcatttaaagctaaatacttgtttgcttgttttgtttctaattcattttttattttttattaaatatctagtgtaaataatcagatagcagtgcaagactttgataaacgacagtcccccttcccactcttggtgtctgctgctcagaggcaccttcagtctgaaaatatacatcctcttgtagacatttttctggcattatttctttttaccttctttttctctttttcactcttcctggaacttctatgatttgcatgttagacttccattaattatcttttctatttttcatctcttgattttctactttttaggatatttccttgattttatctttaactcttctgtggaatttttaaatttctatcaaggcaatttccgagagctcttctttgttctctggatatctctgtcgtgcattcgagtctgagggctgctgggcttttttagcgacgtctgcatgcatgtgcgggtcatgtgtgtagtgttctctgtgtgttgtttttgtttcctccagtttttttgtggtttattttggactcaatttattttagagatattcaggaggtgactgatgtgctgggcgctcttataaagtgccttacaatattaactaattcagtcatcaccataaactacctcaaactttaaggtagtttccttttttttttttttgagacggagtctcgctctgtcacccaggctggagtgcagtggcacaacctcagctcactgcagcctccgccttccaggatcaagtgattctcctgcctcagcctcctgattagctgggattacaggtgtgtaccaccatatctggctaattttttgtatttctaatagagacagggtttcaccattttagccaggatggtcttgatctcctgaccttgtgatccgcccacctcggccccccaaagtgctgggattacaggcgtgagccaccgcgcctggcccactttaaggtagtttctgttatccccatttaacagataatgaaactaaggtacaggagcgttaaatagttacacaccgtcatagaattagcctcagagctaggatctgaacacagcagtcttgaggcttttgagttttcattgataacaactgcattatactgtctctgtatcattaagtttcactaataaaatggttagctagaasaggggcaaggacagagttctacagcatgtcaatagaggcttccctcttggcttacaacagtccattcatcaccacttcttgttcagctagttacatatctgtcttcagaccatgtttctgttctttatccatggagacacaaaagacttgactatgtgactccaaaaagttagaggtgtgaggcagcaagaaggaatgggtgggacattgactctagagtcctacagacctgtaatagaaacctgtctcctcctactcttgactatgtgactatggcaaatagttaaacttctctggacttcagttttttcttctataaaatgaggagaatgatatctaccttgctgggtagttgtcaggattcaagataaagtgcctagtacactgcaggcctttcataaatgataactattgttatctgccagtctagtaatccttttaaaaaaggaaatacattaagacggatggtttgtttttatgaacttttgctaactctattattgtttcctcccccttagagctcacaaagcagctatttgataacaggctctagaattttgctttgaatttacatcaaatcaccagcctgtagtttttggcaatcactttcaaattttttgaaaattagaacaatgtttgtctgtcctcactttccatcagttctcttattcactagatgcctcacacacgtgtcagtgacaggggctctgagatcctgtttgcaggtttcctttgtactctgaggtataatctgtctagacaaggagtcttgggctagtctctgatagctaggtacccccttttatctccctctgagcctgtcttggctttcagttccatccgaccattgtgtattctctttccaatctgatgcttgttttccttgcagagaaaacagaagtaagataggaattcagcaattccattttacatctcatacctcacatttctctcagtcaccagaagtccaaatttcccaggccattcttgtgcagatgcccctcctcaccctgccatcttcactccctgttctgtcctcacttcctgtccttcctggcttgtaaaccatttaactgactgctctgtcagcaatgtccctgtagcctcatccgcttctctgatcattttcttccccttctttctctaattgttttctgaggatatgtactgtttcccctgcagcccacctaaactgttttttactctcacagactttargcctgagaggtggcaaaggcatctgttgtccttgcttcctattgccattttttttcctttttttcatctttttttttttttctcgctctgtcacccaggctaaagtgcactggcgcaatctctgctcactgcaacctctgcctcccaggttcaagtgattctcctgcctcagcctcctgagtagctgggactacaggcatgcaccactatgcccagcttttttgtatttttattagagacagggtttcgccacgttgaccaggctggtgtcaaactcctgatctcaggtgatcctccagcctcagccttccaaagtgctgggattacaggcgtgagccaccatacccaggcgcagctgaggttttagatgaaggaaagggctggcacggtggctcacgcctgtaatcccagcactttgggagaccgaggtgagtggatcatttgaggtttaggagttcgagtccagcctgcccaatgtggcaaatccccatctctaataaaaatacaaaaaagccgagcgtggtagcgtgtgcttgtagtcccaggcactcaggaggctgaggcaggagaatcacttgaaccggggaaacggaggttgcagtaagccgacattgcaccactgcactccagcctggaagacagagcaagaatctgtctcaaaaaataaaataaaataaaacctctactgctttgaaattctatttattagttatggcttaatttttaaaatgggagtgggctggcaggattcagttgttcaaacatcatatcaggagttgctctgtctctcacttcccttctctctcctctcttctgtcccatctctccgggtcaaacctccatttctttctatgtgctttctacttttcctttgtatcaatcttatttgaaatctgtctttctttataaggtgacagaaatggccaccagaatcatattaagcttggaaaaarggaggtactttttcccagtcagccctaagtatttccagagttaattttcactgggctgccttgtgtcagatgcctactgagggagtgggaagggtaggtctaataggaaatcttggtaacagyatatgttaccattaaagggaagcctggattccaggcagatcaaaacaacaggtagggctcttgcctgtccaacgcttaacaatacactttgtgttggcacagtgagctttgcasatgaagttagttaaaaataaaatcatagttaactgataaacctttgttccagccaatgaccttgcttaccccaagaaatattatttattaaatattatgaaattaaatgaaaacagttatgagctcttatgataaagcgtagagacaacccaatttcaagttaattcacaggaagataataggacaatatatggttgtttatgatcttgtttttacactgcttcatattttacatatgtgactttcaaaatcttaagacttgactgggcacagtggctcacacctgtaatcctagcactttaggaggccaaggcgggaggatcacttgagcccaggagtttgagaccagcctgggcaacatggcaagaccctgtctctacaaaaaataattaattaaaaaaaaaaaaaagaagaagatgtgttgtgttgctgggcacagtggcataggcctgtagtctcacctacttggggaggctgaggcaggaggatctcttgagcccaagagtttgagggttcagtgagcagtgattgcaccactgcagtttaacctgggcaacagagccagaccccctttctttctttctttctttctttcttttttttgtgagacaaagtctcacttttgtcccccaggctggagtgcaatggcacgatctcagctcactgcaacctccacctcccaggttcaagcgattctcctgcctcagcctcccgagtagctgggattacagacacgcaccaccatgcccggctaatttttatattattagtaaagacggggtttcaccacattggccaggctggtctcgaactcctgacctcaggtgatctacccttcttggcctcccaaagtgttgggattacaggcgtgagccaccgtgcccagccccactttaaaaaaaaaaaaaaaaaagaaaaagaaatcaagatcttaagacttttttttttttttttagtgacagggtctcactgtgttgcccaggctggtcttgaactcctggacttaagcaatcctcctgccttggcctccccaaagggctgggattacagtcatgagccaccatgcctagccaagacttttttttttttccctcaaagaaaaatattaacaacataattattttatagctagacagataagtttacagcagcagcttattcatgtgatggagcacatctgtaaattaattgatactattcctgatgataaactgaaacttttggattgtgggaacgaactgcttcagcagcggaacataaggtatcttaattttcccccttctggaatatatctgattatatttctaccactctaagtgaaaaatggacagggcaaaatgttcaggctttctggcctggaaatggcataaggatgatcatcatgccactatgtttttgatttgtttacttttcaaaccactcctttaacattcgtattcatgtttttaagattgggaaaaaagcgaatatattttgctacaatttctatttggtatgaaaactacagatttgcttttgtggcctaccagagtaaactacttatatttaatacgttgttctcttttctctcttcagaaggaaacttctaacggaagtagattttaataaaagtgatgccagtcttcttggctcattgtggagatacaggcctgattcacttgatggccctatggagggtgattcctgccctacagggaattctatgaaggagttaaatttttcacaccttccctcaaattctgtttctcctggggactgtttactgactaccaccctaggaaagacaggattctctgccaccaggaagaatctttttgaaaggcctttattcaatacccatttacagaagtcctttgtaagtagcaactgggctgaaacaccaagactaggaaaaaaaaatgaaagctcttatttcccaggaaatgttctcacaagcactgctgtgaaagatcagartaaacatactgcttcaataaatgacttagaaagagaaacccaaccttcctatgatattgataattttgacatagatgactttgatgatgatgatgactgggaagacataatgcataatttagcagccagcaaatcttccacagctgcctatcaacccatcaaggaaggtcggccaattaaatcagtatcagaaagactttcctcagccaagacagactgtcttccagtgtcatctactgctcaaaatataaacttctcagagtcaattcagaattatactggtaagtttaaaataaattgaatgcttatatgaaaacaaaactgtcccaaaataggaattatataagaaaaaccatagcaaatcatcattgcctgaaaacattgttgctatgcaaatttctactgatgatatgaattacaaatcacaatttcaaaagcaagttgctcttttgtctctatagcagctgtagttttataaaatgtgtaattataacctattgtagtacggctctaaagtcattacaaatgtgatgtgcctttgaattaacattttttagttcctaaaacaaactcatgagggccaagtttttaatgattttgggatgggcaaaagcaaaaatggattcgcatgctaaaaatgtattttagaattctgtactgatgagaatcgattaatacaaagtagagaagcatgttttatgtgttaaaatgttaaaatatagggtagtctataaaggatatgaagtcaggagtgtcttaaatcagtcaaactacttctttgggtctaagggctcactgcatgccatgtgctatgttgggcgccgatcatttaaagatgaataacaaatackaagtagttcctgccctcctggagctcacagcttagtgagagagaagttttgagaggaatgaaattagccactgaaggctccagagaaaagccaaaaataattttaaaaccttacatcaaccctataaagttatcaaaagtattttttagctgaaataagtttataaagtacagccctccctatttttgccattgatgacttaataccacggaggtttttcttacagttacgctgctgacctttaaaacaacgattaatggatttatttttgtatcatgttagaatgtgtcatacttgatgtttgcaattatcttgagacagttgagtgttggggttagcgtaactgccagagctccgtgagtacctcttgttctctgtgctgaaccagagttgcgacagccaggctgcagagcaggggcacgtgtgagagatgttatgaaagaagagcctgaggaagctcagatgactccaaggtttcagacactgatgactgggaaaactgtgacaccagtaacacaaacaggggagtcaggaggcggagtcagatttggagaaaagctgagaagggctagtttaagtctagaggttaaagtgctggtaagtcattcaggtaccaatgtcttgcagacaacgggagctgtgtgcaggactggaacttaggagggtgtcagttgggtcttaagagaggtgtaggcatttgctgcacacgggtcatgtttaagatcataggactaggaaagctccaaaaaagaatgtctacagagcccagtcccaaatatctgaaagactccctcccctatttatggggcagatggaggtagtagagccaggaaagggaatttaaaatgagtagaaaaccatgattgtcttggtggtcatggttggaggaagggagaagaggaaggaaagaataaaagtagtggtaggtgctgtagaaaaagtcaaggaaatacttgatttgggactttggcaagtttttggtggctttgagacttgtagggaaggaaagccagtaaagagtttaagaactgtgctgcagggaaacgtgtgccagtgattctgcagggcaagggaaatgctaaagctgtactttcactgtattcatgtactgatttttcttaacgttgattattttcctagacaagtcagcacaaaatttagcatccagaaatctgaaacatgagcgtttcyaaagtcttagttttcctcatacaaaggaaatgatgaagatttttcataaaaaatttggcctgcataattttagaactaatcrgctagaggcgatcaatgctgcactgcttggtgaagactgttttatcctgatgccgactggtatgtatttttagaagtgaattggcaggaatccattggcagatgttaaatgaaagctctttaatagaaataaaaagaccacctacacrgtatttctatcatttagggacctcttaaacctcctgtaccatagtgagaaagcatattactttatatcctttgttctggttgttgacatcatgaagtttatagccctgtaagattttcaactcgaagctcattgtgttgaactgatstagaatttttctttgggaatttttcttttttctagtctaagcagttttggaaatcaaacagaaaaatcgctgtcagagaccatgaccatttctggcagtttatttgcaacaatctggtgttgcatagtggttaaatcatatatgcatatatgcatagtggtccatcagctatggaccaaaggcctggacttaaagaacagctctgctgctcacagcagtgtggccacatgcaaggcactttactccctgggcccattttctcatgtgtgcaatggtgatagcagtaaagtacctggttcacagagtggcatgaggattaaatgaaaatcatttagcacgatattgtgttggccccactttaaagagtctaggacattcattgtgctgttaaagcttatgacagctgttcaatgatttatagtcattcacatgagaatattaaatcaacagggcagagcgcaaggagaatttgcagtttcagtacctatgtgtagtcctccctctgtctatcacctgacttgtgacctttagcaagttagctagtgctgtcattattgtataatgttgactgggcatctgaactttttcatcctggtttttagatttagatagccttggcttaataatcagcatttcaatttttattaatttattaatcactctgtgccttcctttcaaccctattttggtgtttcagaactctaacgctggaaaaaaccttggcaatgatctaatccattgattttttttttccagggcttcccattgtcctttagggtttcaagasggcatttttaaggtccttccaccccaatttcaaccacttgtgagagagagatatatataatatataattatatataatatgtatattgtattgtatataatatgtctattatatataattataatatatagtgtgtgtgtaaatattccaaataaggtttattttatttttatttcttattatttttgagacagggtctcttgatctgtcacccatgctggaatacagtggtgctatcacagctcactgcagcttcaactgggttcmaacaatcccccccaccttagcctcccaagaagctggggctacaggcatgtgccaccacacctggctaatttttaaattttttgtagagatgggatctcactgtgttgcccaagttgatctcaaattccctgggctcaagcagtccacctgcctcaggctcccaaagtgatgggatttataaataataaaagtaaataaacattatatagaaagtaattattttaatcctagtgtcatttttagagactcttctactactagaaataaaaactttactgtattccactacattttaagtttcctgccctaattcttgcctttgctattatatatgtctatataagatgtcctaggccgggcgcagtggcttgtgcctataatcccagcactttgggaggctgaggcaggtggattacctgaggtcaggagttcaagaccagcctggccaatgtctctactaaaaatacaaaaattagcaggatgtggtggtgcatgcctatagtcctagctactggggagggtaaggcatgacaattgcttgaacctgggaggtggagattgtagtgagctcagatggcaccactgcactccagcctgggcaacagaatgagactctgtctcaaagacaaaaacaaaaacaaaaaaaacactttttttttaaagatcatttttacacattatttaaattgcctaaatataatagtttgagtcatttgagtatggcaaattgttggcaccagggacaatatgccttggtgtcctattaatgatatgatttcttttgtaacttttacattcatgctctgaagacagaacctgacagatattttttcattgttctctttcaggaggtggtaagagtttgtgttaccagctccctgcctgtgtttctcctggggtcactgttgtcatttctcccttgagatcacttatcgtagatcaagtccaaaagctgacttccttggatgtaagttataaaaatactaataaaaacacgccttagaaacaattaaatttcagtcctctgsataacctttttattaaatagttygtgatttgtaaaaaataaagcacagcagttaaatttgcagttgaacagaagtctgaaaatttgatacagataacctctagttcaatctgtttttattctacaagaatgtatcttagtaagaacttttaaccaatgctattttttgctgatgtaaatttttttaacgaatagaaaatcatttcttttttcagtactgccaggtcggcatagttctctttcccttatatcttaaagtgcatacacacatgcatgcctgcacacatatatctttttttctcatggctgagtttaaggaagtaaatgaatgcattctacttaactcttcacaatgtagttgggggtggtggctcatgcctgtaatcccagtgacttggaaggcaaaggtgggaggattgcttgaggccaagaattcaagaccagcctgggcaacacagcaagactttctctacagaaaaataaaataagctggacatggtggtgaaaacctgtggtcccagctgcttaggaagctgagggaagagggtcgctagagcccaggagtttgaggctgcagtgggtcatgatcatgccactacaatctagccttggtgaaagcragaccccgactcaatcacattgtgattaaaaagaactgttttaagagttatgagtcaccacccctcaataagaccactagtttggttttcttccaaagaatgtcttagtgcagtggtggtagccattgttcaaccatttgtcatattatggccccttcattgtcattaatctttaaaaccctgaaatacatttatctaaaaaaaagatgccatacagtaggactggaatatcttgtataccaaattcatatttatcttatttacaaagatgaaaaataaagcaagaaaaggaaataaataatgagaagaccattttgtgttatgcttttttttgttttgttttgttttgttttaagacagtcttgttctgttgcccaggctggagtgcggtggtgcaaccttggctcactgcaacctctgcctcccaagctccagcaattttcctgccttagcctcctgagtagctggaattacaggcacctgccaccacgccaggctaatttttgtattttcagtagagatggggtttctccgtgttggccatgctagtcttgaactcctgaccccaagtgatccacctgcctcagcctcccaaaatgctgaaattacaggcgtgagccaccacgccctgcctgagttatgcttaataagggttttttaaaatgtatgtacttacatacttgttatgttgagatatgtatttcctttgataggtttgatatgtgactaataaaatatttataaaacctaaggacaaatgtaattttgtcaggttaatgtataaaattgaaattgtttactacttttatacttagattccagctacatatctgacaggtgataagactgactcagaagctacaaatatttacctccagttatcaaaaaaagacccaatcataaaacttctatatgtcactccagaaaaggtttgtatttatatcattattttaaaatatattaaagaccactagaatacatatatttttaagattttaacaaaattttgtatacgtagtgcaaagaatttttgtacaactttcatccagaaaccccaaatggtaacattttactataattgctttgtattctctctctgcatatattttcctgacacatttgattgaaaattgcagacatggtatccttttaagccctaagtacttcactgtacatttcctaaaaacaacgtattctctcatataayctcagtacaatgatcaaaattaggagatgtacattgatgcagtactattacttaatctgtaaaccttattctggtttcactagttgtcccaataatgtcctttatagcaaaagaaaatcccagatcatgcatgcattccgttgtgcttctctgtaatcttgtaaacagtttctctctcttaatatctttcgtgattttgaagtttttgaaggccagtcgttttcggaattgtccctcaatttgagtttatcttgcttcctcctgcttagattcctgttactccttgaatatcacagaaacagtgatatgttctcatgcccactgtcaggaggcacttgatgtcgattcgtcccattactgacaatgttagttaactgatcgcttggttatggtagtgtctgatagacttctccgctgtaaagttactcatttctttttggcctttgtaattagtagatatcctgttgtgggatgctttgagactaygtaaataccctgctagtgatcagaattttacccacaagttttagtatccattgatgattcttccccaaatcagttattactatgatagatataaaattattttttaaatgtagttggtgttttgccataaggaagagttttcctgttggttacactttttttttctttttttttttttgaggtagagtctcactctgtcacccaggtgggagtgctcggctcactgcaatctcggctcactgcaacctgggttcaagtgattctcctgcctcagyctcccaagtagctaggaatacaggtgtgtgccaygatacctggctaatttttgtatttttagtagagatggggtttcaccatcttggccaggctggtctcaaactcctgacctcaggcgatctgcccacctcggcctcccaaagtgctgggattacaagcgtgagccactgtgcccagcccacatatttattgatactagcatgaactcgacttcttaatttattcaatgagttacattcaattatcaagtattttgatgttctaattgtcctacatgtgaccagtgagacatctctctcaagctggcttctctgtccttttgacatgtcccggtcaagatgtgagtgctacatgtgctcgttgctactgagatgtcattgcttctaggccctgttatgaagagagctataaaatatataatttttcccccagccaacacgcatccatataacccagatatgtaaccctgttgccaatgtaaatgtatggtggccctcagatgtcttgaagcagacaaaagtttgagaaccactaacctgctaaataagctgtttgcttaatgttggtgaacattctaaaatttgatctgctattttctattacttctgctgttctcttcatagattgaaataagaaccaattttatatggaggtgtttttgtttttgtttttgttttttcgagaccgagtttcggtattgttaccaggctggagtgcagtggcacgatcttggctcactgcaacctccacctcccgagttcaagcgattctcctgcctcagccttcctgagtagctgggattacaggcatgcaccaccacgcccggctaattttgtatttttagtaaaggtggggtttcaccatgttggttaggctggtcacaaactcccgacctcggatgatccacccacctcggcttcccaaagtgctgggattacaggcgtgagccaccgcacccggccttatagaggttttaatacagcttaagttgtgatggaatttgaagaccacagaatcatraggtgatgtgtttcagtgtttttacatgtctaatgtatttctggcctagatctgtgcaagtaacagactcatttctactctggagaatctctatgagaggaagctcttggcacgttttgttattgatgaagcacattgtgtcagtcaggtaaatactgttttttatatccggaaataccgataaatacatactaccaacaatatatgtatttactgaataaaaacccacactgagtgaacgagtctcctattttactgaagaataaggtagttcttaatacattgagcagtgttggctttttatagaaggaagctccaagtagtctgaaaagcagtatttttttttccaactagtggggacatgattttcgtcaagattacaaaagaatgaatatgcttcgccagaagtttccttctgttccggtgatggctcttacggccacagctaatcccagggtacagaaggacatcctgactcagctgaagattctcagacctcaggtgtaagtygttgcacgtcacgtatttgagaaccctggggcagtgactgccaragctgctacatgttagaatcacctgtggcgctttaacgccaccaccccacccccaccccacccccatgcccaagttgtaacccgatggcagctaaatcagaacgtttggggctgagagccagtatttttttaaaaatccccaagtgattacaatgtgcagcagagtttgggaaccagagtcctagggcttttcttcacttactgaaattaaaactccttttcagtacctactttagaagtagggataaattgcatgccatatctatcatccctggtatagtcccagtaataaattaatttttacttatctaattttggcttccatatatcctagagtatacttcttgaaatgaaagatgaccctgctttgtcatttccccctaaggtcccagttgaatccaggatgttgaaaatagtccagatactatgtcgaatagcttttttactttgttttcttctcaacaacaaaatgcttcttgttgccaccaaatccataattcttcagtaacaaaatctactataaaagaaatccccccccccttttttttttttttgagatggagtctcgctctgtcgcccaggctggagtgcagtggcctgatctcggctcactccgagttctgcctcccggggttcacgccattctcccaccttagcctcccgagtagctgggactgtaggcgcccgccaccacgccaggctaattttttttgtatttttagtagagacggggtgtcactgtcttagccaggagggtctcgatctcctgacctcgtgatccgcccgccttggcctcccaaagtgctgggattacaggcgtgagccaccgtgcccggccaatccccacatatttatctaggctgtactggattattttatacttctacctgagtttgtagagatatggattctttggtaggtttattcactcagcaaatatttatttaacaactgttgtgtgccgagtttaaagtatttttttcttctgatttattagtgtgcactttagtttcagatgtaaacattaacatggtatgcctgaaggagtaatgactgaattggatattgaggtgaatttttaaagcacggcttttgttcatttgaaaataaagacaagctggtgctataaatattataagcagtaagaatagcaacagtatctcttagagggttatgagaagaactgaaggttccttatgaaggatatgaatgggtcatgtgattaagatagctacaaaagcttttgcaggttaaactggcagcttctaaattatctgatctaaatcaaggaattcaagcattttgggtttcttccagcctttaagttgtttggttccagcctagaattattttattgctagtagcactgttatatagcacaaatgaccatactcaagtgcaaggattttagagtcctcagaattttgtgtgtgtgatcacaaagtttggaatggaatattgtaatttaatctcacttgcagaggagtatttgtattaaatttggggaaaaatattttgcgtctataattgatatgcattataatgctatatttaagatgtcgtattaggctgggtgcagtggctcatgcctgtaatcccagcactttgggaggccgaggcaggtggatcgcytaaggtcaggagttcgagaccagcctggccaacgtggcgataccccatctctactaaaaatacaaaaattagccaggcctactggcgtgcgcctgtaatcgctgctactcaggaggctgaggcaggagaattgcttgaacccaggaggcggaggttgcagtgagccaagatcacgccactgtactccagcctgggcaacagagtaaggccctgtctcaaaaacaaaaaacaaaaaacaaaaaaaaagatgtcatattatactttagattctaataaataacctatttgcaagtaagtacttctgtaagtactacattgatctataatttttttttttttttttttttggagacaggtcttaccatgttgccatgttacccaagctggtctcgaactcctgggcttaaacagtcctcccatctcagccttcctaagtgctgagattcttctgtcctcttacgccggatgcaatctactgttcttttagatcagttacatcaatggcaaatgcctatagttaaatgataaaaaaaatttcttttccttttgaatgactttttgtaagtataggatttgtgatttatgtttgagtaaacagtgtacatatttatttatttatttagaggcaggcaccttgaatctgttttcttagtactgtggggaagagatctgcctgggaaagcaaggttgtggatttccagtctccagcacttggtacataattggcactcagtaataatcaataaatgaaaaatgtgaaggaatttgggtaaatgtaaaaatgtaggcatgtctgttgactccttaatgtgtttggcacttctctgcatttggaagtaggaaattttaaggaatactttctgggactctgtttcctgatcttttctgccagtaggccctggtttggattaaatttgctcaactgctgctatgtcgtggccctggcgaagtcaggtattcctaaggttgaagccacagcccctgtgctgctctcctccygccagtctgtaataatattcttcctctttgggaaatataaggcacacaaaaaaggctttattccatttccttagggccttaaaatatgaactggaagagagcaaagagacaggcacatagagttaactataatagaacaataataatagctaacacttacatatccagcctactcagtgtgccaggcactgttgtcattttaagtgtatttacctccttgtccacacaaaagcaaggtaggtactcctattttcctcattctacaggtgaggaaattgagacacaaagagattatataacttcatatgcctagcaagggttggagtgagaacttaaaacaccagatagctggtttcagaatcctttaaatactaggtcaaattgcagaaagaagaaagcagtgatttgagatgtaaattacagctgcaggaactgaagaagacaagataagctagaacccccagtaacagctgttacaaggaggggtcagatcaagttttgtaaaggcactgggcattgtaggaggagtagtttatttaaaagcataggttgggcatggtgactcacgcctgtaatcccagcactttgggaggccaaggtgggcggatcacctgaggtcacgagttcaagaccagactgaccaacaaggagaaaccccgtctctactaaaaatacaaaactagccgggcctggtggtgcatacctgtaatcccagctactggggaagctgaggcaggagaatcacttgaacccgggaggcggaggttgcagggagccgagattgcaccactgcaccccagcctgggcaacaagagcgagactgtctcaaaaaaaaaaaaaaaaamaaaaaagataaaagcgtagacagcagccgagcgcagtggctcacagctgtaatcccagcactttgggaggccaagggagacggatcacctgaggtcaggagttgaagaccagcctggccaacatgttgaaaccccatctctactaaaaatataaaaattaaccaggtgtggtggtgggcgcctgtaataccagctacttgaaaggctgagacaggaaaattggttgtacctgggaggcggaggttgcagtgatccaagatcatacgactgcactccagcctgggtgatagagcgagactccatctgaaaaacaaacaaacaaaaaaaggcttaaacagctgtattgaaataaaatttacataccataaaattcacctaaagttgacacttcaatggccttttttttttttttttttttttagtttataaggttgtgcagccatcaccattatctaattttagaacatttttgtctctgttgaaagggagagtatacccattagcagtcaattcctactttctcactttccccattcttaggcaacccctcatctactttctgtctctgtaggtttgcgcctattctggacatttcatrtaaatggaatcacataacatgtggccttttgtgactgacttctttcactgagcatgtttttaaggttcctccatgttgtagcctgttttcagtatttcattcctttctattttcagataatattccattttatggatcctactttctgttttatttgcccattcatcatttgatggatgttcaagctgtttcagtgttttggtttttttgaataatgctgctgtgaacatttgtgtagaagttgttctgtggtcatcagttttatttctcttgggttgctgggtctgtggtaactgtatgattaaccttttcaattcaaggactactaaactagttttcaaagtgcctccgtcttttttttttttttttttttttttttgaggcggagtctcactctgtcacccaggctggagtgcagtggtgcaatctcggctcactacaacctccacctcctgggttcaagcgattctcctgcctcagcctcccaagtagctgggactatttttgtatttttgtatttttctaattttgtatttttagtagagatggggtttcaccatgttggccaggctgttctcaaactcctgacctcaggtgatccacccatctcgacctcccaaagtgctgggcttataggtgtgagccactgcacccgaccgcctccatcattttatattaccttcagcagtgtgtgggggttgcagtttttccacatgcttatcaacacttgttactgtctttttttattacagctatatgaagtggtaggtgaacggcattttagcaggcaaagagtgaaaattcagggctgaagtttctgttataaaagtacaggtcaggccaggctcggtggctcatgcctgtaatcccagcactttgggtggccgaggcgggtggatcacctgaggtcaggagttggagaccagcctggccaacatggtgaaaccccatctctactaaaaatacaaaaattagccgggcgtggtggcatgcacctatagtcgcagctactcgggaggctgagacaggagaattgcttgaaaccagaaagtggaggttgcagtgagccgagatcatgccactacactccagccaaaaaaaaaaaaaaaaagtacaggtcaggcccaaggaatggtgaataatccattggataagtggagaaacatagagaagggatgaccctgacaaggtggcttgacgccagatcatggaggatcttgcatataacgatggtaaaatgtttggactttattcttttggcactttaacctgggaagtggcttgatctgaactgtgtggatgaatgataaccctggcaagagaatagaggagaggatgagtgagagaacagaaagttagaggtagagcagcccttcaggaacttattgcctattgcagtcattgaggagagatgatgctggtggaaacagcagaagtggaaggaagaaacagagtcaagagagagggcaggaatggtaactaaatggaatgagaagagtggatacggttgaagtttatactagttcctggggcaggtgcctagaaccattgaccataaatggaatggaggaaggaagatgagtaataaatttgattttagatgcatgatgcctgggatgtttaagggatgagtggatgaccacgatagccatcttcataccttctttggtcacatgtacctcctgaaaaaatcctggaaaactatgtacctcctgcatatatacatatatgttttaaatatatatataatatatatgtattttatatatatgtgtgtttttattttttatatatatatgtgtgtgtgtgtgtgtgtgtattttagaccaagtttcactcttgtcgcccaggctggagtgcaatgacacgatctctgcaatctccacctcccgagttcaagtgattctcccgcctcagcctcctgagtagctgggactacaggcacttgcykccatgcccggctaatttttctatttttagtagagacggggtttcaccatgttggccaggctggtctcaaactcctaacctcaggtgatccacccgccccagcctcccaaagttctgggattacttgagccaccacgcccggccataagcatacattttgattgagaatgtatctcttaatgagataggccttttgtttgtttgtttgtttaagagatgaggtctcgttatattgttcgggttagtctggaattcctggcctcaagtgatcctcccaccttaatcttctaaatagtgtggactacaggtccacacccagctaggacttttgttgttcacttagttgacatatctggatgaattgggtccatttatatttcttatttttatggatgtaagcactaagaaatattgctcacataaacatgtagatgggaatggaaggcattttttgtagctgtaacaattatttgaattccttctgatgtatatgccaagattacrtaatgatcagtcatcaaaaattatttttaattatctgtcaattgacaactcaattaggtctttcaaatttgtggtaagcaaagaattggaaactctctgggaaaataagcaagatcaatcgttattcactttactttttctaggaaaaataccctaaaaaaaagctttaccaatacttacctaatgactattaagtagtcttattattctttcaacaagaatcttgttccctgtatccaatatgtatggaagagttggggaaatcaaaatactgttagtttcagtatacctttccaatatgatatttttgacaaaatacttttattgtgtgatacgcttttctaataacttttttgttgttgttttttgagacagagtcccaatctttcacccaggatggaataagtacagtggtgcgatctcggctcactgcaacctctgcctcccaggctcaatttatcctcctgcctcaacccgccaagtagccaggactacaggcgtgcaccaccatgcctggctaatttttatgttttttgtttgtgttgtttttttcgtagagacggagtttcaccatgttgcccagactggtctcgaactcctgagctcaaaggatctgcctgccccggcctcccaaagtgctgggattacaggcgtgagccaccattcccaaccatattgtgtgacatacttttaaatagagttttgtcaaaactgtggctatagattagctctttccaaaaatgggaaatgaccaccatataacctaattggtaaagccagtctttattgctaaattagacttcttttctttgtgggttttgttttgttttgttttgtttttgtttttgttttggagatggggtcttactctcactatgttgcccaggctggtcttgaactcctgggcttaagtgatgttcctgccctagcctcctgagtagctgggactacaggcacatactaccatgcctggctggcttcattttccttttcttttttgaggggggtggggggaatggagtttcactcttgttgcccaggctggagtacagtagctcaccgcaacctccacctccgggattcaagtgattctcctgcctcagcctcccaagtagctgggattacaggcgcccgccaccatgcccagctaattttttgtatttctggtagagacagggtttcaccatattgcgcaggctggtcttaaactcctgacctcaggtgatctgcccgcctcggcctctgaaagtgctgggattagaggcgtgagccactgcacctggcctcatttttcaattcacataaactatttagtacacatcccatgacaactattgtcaattccaaaagcaacaagctgagctctaattgactttgtttccwcacacaacactttgaaaagacatgagtttgacaccccaaacaggataatatttaccattttaatggtaatatccagcagaaccttagacaagaaacagtagaatctaacttttaagaaaactttattaaaatgtaattcacacactataaaattcatccatttaaagggtacaatttagtgggttgctttttttctgtrttttcacagaattgtacaaccatccccaatatctaagtttacagcatttttatcaccccagcgagaaacctggtacccattagcagctgctccgcatcttctccctcttgtttgtgcccggcttctttcactgagcgtagttttcaagggtcatccatgttgtagcattggtcagtaagtacttcattcatttttatagctgaataatattgcagtgtatcagtattttgcattttatttatccatttatcaattgatgggaactgtctgtaactaggtatttggtaattccaaacatcttattttccaacaggcagagtaagatttgttacatgtaataaactccaagggtctattaactttttcattataacaaattgtgtaaatattgctttcagttagttacccacagtccttttgcagtagagatagttgtcttggttttaattggattcrtgatctacaactttatgttctaatctcatgtcatttttattatttttagtaaaagtaatttgtttgactaaattaactggtaaacagttctgagctttttcaattgtgtctacaaattttaagaaattcagattatgtgccagatgtttttagtaacagctttgttgcggtataatccacataccatacaattcccatatttaaaaagtacaattcaaagtttttagtatattcagaattgtacaaccattgccagagttttagaacatttcatcaccctccaaaaacacccatgcccattgcagttcaatctccttttcccctcacatccccatcctgccagccctaggcaaccactaatctgctttctatgtatagatttgcctactctgggtatctcgtgtaaatagaatcatccaatatgtgatcttttttgtgactgtctacttagcataatgttttcacggtttattggtgaataatattccattgtagacgtctacgacattttattcatcagttgatattgggttgtttccatttttattttttactattatgaataatgctggtataatcatacatgtataaatttttgtgtggacatatgttttcatttctcttaggtatatgcccaggagtgaaattattgggtcatatagaaactctatgtttaaccctttcytttttttttttttgagacggagtctcactctgtagcccaggctggagtgcagtggtgcgatcttggctcactgcaacctccacctcccaggttcaagtgattcttctgcctcagcttcctgagtagctgagactacaggtgtgcgccaccacgcccagctaattttcgtatttttagtagagatgggggtttccccatattggccaggctggtcttgaactcctgacctcatgatccgcccaactcagcctcccaaagtgctggaattacaggcatgagccaccgtgcccagcctatgtttaacgttttaaagaactgtcgcactgttttccaaagtggctgtgccattttacattttcactagcgatgtatgagggttctaattttttcatatcctcaccaacacttgtttttgtctctctttttgacccaaagatttttttaaattaataaaacacttttctgaaaataaatatatttttttaatgtgggaaaaagcaataaggccattgttatgcccagtcaccatagcattcctatcggtggagagactcatgcaccgtttccaacttaagcccaaatcaactcaaatgcattttaagattttcttcatcatttgtattcctagacaattctttaatctactaccttttttgccacaatctgctacacattctgccttttcaagcactaaaaggactctaggagttttttgcaaagaaatgctgtcataagagtggtggtatcaaagtattgtttaacggtagtctcaaagactttcagggtaatgcattctgtgattatagagatgaaagaaacaacatcataaagtgaaggtcatcttcattcccaccaccttattctcagtatatctgaaatcagaacatcctaataaggaccaaaatactttgttcctagttattcttcacccttaacagaaataagtaaaacaccgaaagatatgaggccctcctaccaagratttctagtgctttaattaaagaaaatttcacctacactcatactatttttcagtttgctttgtttggtgtcctggaggtttttacatcctggaacagtgcacagtggtaaaattcagaatggatgaaaagtaggattggtttgtttgttttcaggaagtgaggcaatcgtaaaagggaaaaatgggaaaggcgaaacaagcaggatgtctttttttttttttttttctttttagacagagtctcactcttcgcccaggctggagtgcagtggtgtgatgtcggctcactgcaacctccgcctctcaggttcaagcgattctcctgcctcagcctcctgagtagctggaattacaggcacgtgccaccatgcctggctagtttttgtatttttagtagagacagggtttcaccatgttggttaggctggtttcaaactccagatctcatgatctgcccgccttggcctcccaaagtgctgggattacaggcgtgagccaccgcgcccgtccaggatgtcttttttctaattagagacgagggtctcactttgttgcccaactggtcttgaattcctgggctcaagtgatcctcctgccttggccttccaaaatgttgagattattgatgtgagccaccacccctggccagaatttcttgtctgtgggagcattctcagatcagtcttatgaaaaaggacagccagcccttcctatctgcagtttctgcatctgcagattcacccaactgtatatcaaaaacatttgaaagaaaaatagtttctgaaagtttcaaaaagcaagatttgaatttgctgagcaccaagcgctatgctgtgtccacatgaatgaagtgatgtgtaggcatactctgctgtatcctcccgccaggacagaagaaaaatgtcacatagttactgacagtacagtgtagcaactatttacatggcatttatttaatacattgtattgagtattataagtaatctagagatggtttaaagtgtgcaggaggatgtgcataggttatatacatatactacaccattttatatcagggacttgagcatccttggatttaggtatccgaggaggccctagaaccaatcccccatgggaaaccaagggatgtgaaaattgagggtctgaatttgtttaagattcacagaacagactgaaaagacaagagaggagataatggagagaacaagctcactgaggaagtgggcgggaggaaatggggcaagaatagtagaccagaggaagaggaggagcacatctgtctcagagtcagccacattttatttggggccaagaacaaaaataaagtgactgtaatcagtagggctttaactccttctgctgtcctgcagttagctttttatgtatcctggggtgtccaatcttttggcttccctgggccatactagaagaagaacgattgtcttggaccacacataaaatacactaactggccgggtatggtggctcacacctgtaatcccagcactttgagaggccaaggtgggcagatcacctgaggtcaggagtttgagaccagcctggccaacatggtgaaaccccatctctactaaaaataacaaaaatgagctgggtgtggtggcgggcacctgtaattccagctattcaggaggctgaggcaggagaattgcttgaacccaggaggtagaggttgcagtgagccaagatcgcacccttgcactccagcctgggtgacaagcgcgagactccctctcaaaaaaataataatacactaacagtaacaatagctgatgagctttataaaagaatcataaaaaatctcactgttttaagagagcttatgaatttgtgttggaccacattcaaaaccatcctgggctgcatgtggcccgtgggctgcgggttggatgagcttgagtacctggtcaaaatttgggaacattgatggcctaaaaatacgtatatttcctgtgtgatttccttaatattttaaataatgttctaaccatctctgcttttagtcagcctcatcttggagtcaagagactgggctcctgacttactttgtctttctatatgttttctcttccacaatcctaattttttgtcatctagtcccataaacattccctctttatcaccattcttttctttaacccttagccttacttccatttcagtgttctattgtgtaagctgctagcgacaatattcaacttaagactacttggtaggctgggcccggtggctcatgcctgtaatcccagcactttgggaggccaaggcaagtggattgcttgaggtcaggagttcgagaccagcctggccaacatggtgaaactctgtctctactaaaaatacaaaaattagctgggcgcgatggtgggcatccataatcccagctacttgggaggctgaggcaggagaatggcttgaacccagcaggcagaggttgtagtgagccaagattgtgccactgcactccagcctgggcgacagagtgagactctgtctcaaaaaaaaacaaaacaaaacaaaacaaaaactacttgatattagcttgggctgctatgacagaatactgtagactgggtggcttaaacaacagaaatttatttctcttggttctgaaagccaggaagtccaagatcaagatgctggcagatcccaagtcagatgaagtccctcttcctggtttgcaagtggtagtattctctttgcatactgacatatgcgggtggggagagccagcaaggtctctacttatttttgagcacttatctcattcataactccacccctcatgacctaattatctcccggaggctccaactcctaataccatcacactgggggttaggattttaggggggacacatgtagtctataacaatacctaaagtcatattttctcataataactaaattttatgtttgggacttttttaggtttagcatgagctttaacagacataatctgaaatactatgtattacngaaaaagcctaaaaaggtggcatttgattgcctagaatggatcagaaagcaccacccatgtgagtacagccatgtgattagctgtctagaagtaacaaatgtctttttagtaccacaataagatatataaaattgcatattaaacattcctttttgcattatgacagcactaacttgctctttatagagcagactattgcaactctctcaattctggaaattataaaatctcatttggtttaataacaataaattctaacaaaaatatattaaatactccctcctacacacgtatattataacttttggtttcaatgtctttcctcaggcttctatcagtgtttgaattatacagctttttgttttagtgccttgtcccaagcctgtctgcctttgcattatgttaactaaaatgagattctgaaattcatagtagktttccatgtaaccccctttccacttttccatggagaatatttttggtatttctattttattttttagaaattagtatacatatttgtgtggacaaatcagtcagtagagatctaccaagaaaaagtcagtgatttccccgctcagactcacctcccccaggcagctaatgtcaatagcttcatgtgtatatctagacctttggctcagtcacagagagatgacttttcctttaatatcttttaatttccatttctaaaaataacacacataataataaatataatatatgctcattaaagaaaatttatatggccaggcactgtggttcacgcctgtaatctcagcattttgggaggccgaggtgggtgaatcacttgaggtcaggatttcaagaccagcctggccaaaacggtgaaaccccatctctacaaaaattatccagacgtggtggcacgcacctgtaattccagctattctggaggctgaggcagaagaactgcttgaacccgggaggcagaggttgcagtgagttgagatcgtgccactgcactccggcctgggcgacagagcaagactgtctcaaaaaacaaaaaagaaaatttagaaagcaacaaaaagaagaaacaaaagacaaacatcactcaatgagcaaaatcactgttatgttattattaatttctagtatttttctatgcatttttttctactagcatactatatacgtttctaccgttaatctactttatatatcatgagcattttcccatgtcttttaaaaacttagaaaacacttttgatagttatagtatattttatttcacagttccctgtatttgtttccctaatgttgctcagtaaaatctttgtaatttttaaagtttgaagtaaaacttttgtttatgtccttgtatcactttatttcctaatttcccagaaagaaactgagtcaaaggtatttctaagactcttgatacatactgccatatgcttttgacaaagtttgtgcaagaatggcttttcttttttttttttttttttttttttgaggctgagtctcactctatctccaggcaggagtgcggtggtgcgatctcggctcactgcaacctctacctcctgggttaaagtgattctcctgcctcagcctcctgactagctgggattacaggtgcccaccaccacacctggctgattttttttgtatttttagtgaagatagcttttcaccatgatgtccaggctggtctcgaactcccgacctcaaatgatctgccctccttggcctcccaaagtgctgggattacaggcatgagccaccgcgcccggccaaggatggcttttttatacccacatgtatctagtgtgaagtagagcccagagttcatccaggtccacctcacgagtcattagcagcgacaggattaaaagccacatctcatttccagcacacatgaattccttgcttgaattattcacgtgtgtggtcttccagcagtataagaacactacggkagatctatttatggttcatatatttctgaaaatgtagtgtaaattgtgtttttgtttatgttaaaaattcttgtttctcagtactcttggtttcttggcagatgattcagrgataatttactgcctctccaggcgagaatgtgacaccatggctgacacgttacagagagatgggctcgctgctcttgcttaccatgctggcctcagtgattctgccagagatgaagtgcagcagaagtggattaatcaggatggctgtcaggtaacatttttaaagataaacaaataatagaaataatcttttatagcatataaccaaacatgcacatgtagaatgcaaactgtttttaccttgaaggtagtaaacatcaaaataagactgaaatttaaaaaacagattttctttgagacttctaaagttgctttttctttcataaaaaaaatctgcttgagatataattcacatatcataaaatttatcctttcaaagcaaacaagttagtactttttagtttatttgcaaagttgtacaataatcatctctatctaattccagaatttttgatcaccataaaaagaaacctcatacccagtcacttcccccaccccctaatgcctggaaaccacaaatctactaactactgctaacctgtttctagagtttattactctgtacattgcatgtaaatagaatcatacagtatgtggtctttgtgacttttcttttttttttttttttccggagacagagtctcactctgtcgcccagactacagtgcagtagagagatcttcgcttactgcaacctccgcctcccaggttcaagtgattctcctgcctcagcctcctgagtagatgggattacagatgtgcgccaccatggccagctgatttttgtatttaatatttttagtggagactcaaactggtctcgaactcctggcctcaagtgatccacctgcctcagcctcccaaagtgctgggattataggcatgagccacctcgcctggcctgtttgcttttatttagcataattttttcaagatttatccatattttaggatatatgagtacttcatacctttttatggtcagataatattctgttatatggatataacacagtttgtttatctactcatcagctggttagacatttggcttgtttcgtttctttctttytttttttttttttttttttgagacagggtcttactctttcattcaggctagagtgcaatggcatgatctctgctcactgcagaccgtacctcaaacaatcctcccacttcccaagtagctaggacgacaggcgcaccactatgcctggctaatttttttattttttgtatagacgaggtctccctgtgttgcccagcctggtcttgaactcctgggctcaagtgataatcctgcctcaacctaccaaattcctgcgattataggtgtgagccaccatccccgatgtgtttctacttcttggctactatgaataatggctttgtgagcattcacgtacaagtttttccacggacatatgttttcagttctcttgggtagacacctgggagtggacttgctgggtcaaatggcaactctttgtttaacttttagaggaactgtgaaactgcttttcaaagtggctctgcagttctgcattctcaccagcaatgtatgaggtgccagtgtctccacgtcttcaccaatattttttattgtccagcttttttaatgtattcatccttgtgtgtgggaaatggtatctctttgtgggtttttttttatttacatggaagaccacacacgtgaataattcaagcaaggaattcacgtcacccaggctggagtgcagtggcgcaatcttggctcactggaacttccgcctcctggttcaagcaattctcctgcctcagcctcccaagtagccgggactataggcacatgccaccacacccagcttatttttgtatttttagtagagacagggtttcaccatattggccaggctggtcgtgaactcctgacctcatgatccgcccacctcagccccccaaagtgctgggatgacaggtgtgagccaccacgcctggccctctttgtggttttgatttgcatttccctagtaactaacaatattgggcatctgtttccgagatgagaaatttgccgtcacccaggtgggtggggaggaaagctgaaaatactttaggcatctcttttttttttttttttttttttttttttttgagacgggagtctcactctgtcgcccaggctggagtgcagtggcgcgatctcagctcactgcaagctccgcctctygggttcacgccattctcctgcctcagcctcccgagtagctgggactataggcacccgccaccacgcccggctaatttttttttgtatgtttagtagagacgagggtttcaccacgttagccaggagggtctcgatctcctgacctcgtgatccgcccgcctcggcctcccaaaatgctgggattacaggcgtgagccaccgcacccagcctactttaggcatctcttattgtggtaaatgccagccttggatagatccctctaaatgaaaggatgaatttcagcaaaacaactaataattacttggagccaatgaaaagtttcagctcaggaaaaagtatttactttgaagattcagaggaaaaatatctctcaaaattgttttctctgggaaaacagaaaattttagaggatatcagtttagtatcccgagaaagatataagaagacttaatatacgtgaactagtaacaacttccataagatcacagggtgagatgaagggagaaataaaaatccagtttatggccaggtgcagtggctcacccctgtaatcccaccactttgagaggccgatgtggacggatcacctgagatcaaggagtttgagaccagcctggccaatatggtgaaaccctgtctctactaaaaatacaaaaattagccggacgtggtgatgggcatctgtagtcccagctactcaggaggctgaggcaggggaatcacttgaacctgggagccgaaggttgcagtgagccgagatcgtgccactgtactccagcctgggaaacagaacaagactctatgtcaaaaaaaaaaaaagaaagaaaaattcagcttatccaagtaagaaaaacaaaactaagagcagaattatatattaagacacaaatggaatgactcagtctcagtggagacaatagaatcagtgatgtagtgagtagcttgagaatgcaagggaaaaaagagattaaaatggggtggggtggaaattatctttgttgacaaaaggaggtaaggattcagcctaagaatagtaagtgtacccaagcaagaaagcaggataattgaaacagataagtgtgttataaataaatacataacaratatataacaaaaataatagaagactgtyttcagaattggaagaaggaagactgggactgaagaatttcgtacccagctcactgtcatttatgttgaaaccaacaaaaggtcattttcagatatgcaaaaagtttagaaatacatcactcatttgtyttcactgaaatactgattttagtcttcccaaattagtttatatatttaacccaaatgccagtgttttgttttttttttttttttttttttggttttttgttcttttccctttgataaactttttctaaagtttgcctggaagaatattcaagtgaaaataactaagagagtttggcaaaaaacctaataatacaggaacactagtttgcagtacattataggcagatcagtggaacaggaaaacatgtaaaaacaatacatgataaggaaaaagtttgcatgaaagggccaggcatggtggttcacacctgtaatcccagcactttgggaggccaaggtgggaagatcacttgagcctaggagttcaagaccagcccaggcaacatggcgaaaccccatctctacaaaaaatacaaaaattagcctggcatgctggtgcacacctgtagtcccagcttctcgggagtctgaggcaggagaatagcttgaaccctggaggtggaggttgcagtgagccaaaatcacgccactgcattccagcctgggcaacagaccgagactgtctcaaaaaaaaaaaaaaatgatttttttcaagtgctttaaatggttatgtatagtataaataatctacaatggagatatatatatatatatatataactttgataaaaaatatggttaaacaataggggtttataaaaacctaattatttctgctctcagactaattaatccttacagtcagcatgtaatattagcctacaccagctcgacagacttgatctcgttagattcatgagatagaataaaacttggccattattcttcacaaagaatgattgtggcttgaagttttaaaagcgcagaaataaagaaggaaatcmcaattaawcaaagccacttttcccaatttcaagaaataagagctttcagaaagagttggcagccttgcatcctcatctggaggctgcaggcggtgcctcacagccctgtgcccgccctgatactgggagatgcacctggacttcatggaaccctgtgggtcatgcttccggacctgtcggctgacacatcttgctgtgcagcttctccacctgctctccatcactagaagctacaatagtctttctgtttccaaggagatttgcctttgatcagagtgccataaatgtagatggatgactaaccgagagcgcaggccactcaccgccattcctggtgttgataaatgtacccctttactgtccacatactccagagcttgcagttccttccgctggtactcacagttactgaaatcatgtcattagtctcagtctgcctgccagatatttcagatgcctttgaaatactgttcttgcagtagcaattcatttttttaagtgctaaaaaaaaacttgcagttttatttgtgaagtgtaattttgcctggagatataacattttggtytgggttaaatagctcctaaattytcaactgaaatggatatccttgaaaactgatttatcaagctcctgagagtgaactatcmccttgcttccactaagtaatttgtaaggtctaagatccgcagtccctggtgtttttttttttttttttttttttttttttttttttggtataagtagctctcagacttttacccacatgagtttccattaaaattgtacaagctttgactttaaatcagctgatgaatagaaggagttgatgtgtgatcagctggtgctattgggaaaactgatgataagcagtggagcaggtaaraacgtattgttcctgaaccattggaggaactagcagcagtgacctctgaggagccctgggaacaccctggarctcctgagcaacacgttgcttgtgatcactgacctggatatcatgactgtgtgagcaacaccccccacacctcagtagcaaaaacagagaacagtggcagcacatcgtgggctgactgcagttgattctggctctcttacatgagaatgccaagtcatacaagaaagtgcctgccatgctgagcttctctttaccttcttgggttttaatggcattgcaagttatcagtataaaaactcatattagttatactaaatagttggaccaagttaagrtattaggttgttatgtagtgtgcattttaaagtaaaacaaatgatagagcttttagaagcatctattatgaaaatgttccttcaagtctgtgccttatgaatctaataagcttttrcttttatatcaggttatctgtgctacaattgcatttggaatggggattgacaaaccggacgtgcgatttgtgattcatgcatctctccctaaatctgtggagggttactaccaagaatctggcagagctggaagagatggggaaatatctcactgcctgcttttctatacctatcatgatgtgaccagactgaaaagacttataatgagtaagctgggctccattgtagagacattctgtcatcttcagcctcatgatagtagtctactcctgctattgtggtacttctggtccagttttccttaaataatcrtagaaaaatagaggagtttatacagattggcaattttattttagttcatttttattataaaagtggtaagtgcttattwtgtaaaactcaaatgatacagatgtgtacaaggcagaaaatttacaaaccatgccttgtagttttgcccccaaaataactctagttattggtttcctttgtatcctttcagaccctatttctgcatgcattcttgcatgtaacacatatttcaaacatgcaggaagataaaaaggagaaaataatgagctgtcatatactaccatctggattaagaaataaaacacaatcaatcgagctgaacccctccccaccaccccatagcctctcttgtctcatccgtcctctcccattagaggcaggcaaatatcttgtatttggtatgtaccttttccaaatgcacatattttaaaatgtaaatgggattatattatacatactttatatatataatgacccgatttttttcagtcaacagtaggatgtaattatcattccaatgaatacatacagcctgactacctagaattccgtagtatggttattccatggttattaaactaatcccctcttactagatcttgtttattgtttttcactgttatcaacaatgcagtattgaacatccctccctatacaaatatctttgggcatttttgcagttacttatataagattttttttttttcaagaccgagtctcactctgtcacccaggctgcagtgcagtggcagaatcttggctcactgcaacctccgcctcccgggttcaagcgattttctcacttcagcttccagagtagctgggactacaggcatgtgctaccatgcccaactaatttttgtatttttagtagagacagggatttcaccatggtgtccaggctggtctcaaactcctgacctcaggtgatccgcccacctcagcctcccaaagtgttgggattacaggtgtgagccaccacgcccggccttataggataaatttctagagttaaacttgctgggtgaaagtgaatacatattttagaattttattacattctttgctcatttttctcctgggttgtgagagttaaatatatttcctaaatatatgtatttcttctgagaccacttttttttttcttttttttttttttgagacggagtctcgctcttgttgcctaggctgaagtgcaaaggctggaatgcaatggcacgatctcggcccactgcaacctctgcctcccagatgcaagcagttctcctgcctcagcctcctgagtagctgggattacaggctcccaccaccacacccagctaatttttgtatttttagtagagacagggtttcaccatgttggccaggctggtcttgaactcctgacctccagtgatctgtccgcctcagcctcccaaagttctgggattacaggcgtgagccactatgcccagccgagaccacttttaaattaactctggcagaagtacagtgcataggaaatggcacttaccaagcactgtgcccaacactgcatatatcacctcattaccttatttgttcaaaacaactaacttgtgatgtagaggtactcccataaaaagtgagcttcggaaaggttttgtaacttttccccaggatcactgatatggcaggagcaataagagtcgttgtagtagtagtataacaatggtaattattatagataagtgtttatttagcccttcctatgtgccattctaaatgccttacatgtatcatcaactaatttcatcttcacaataaccctcagagataaaacctttgctttcctcattttacagaggaggaaaatgaaatgcagaactagtaaatggtagagccctgacagaacccaagttcgtctgattccaaagtccatgttccttgcactataccaaagtgattctcagtgaagaaaattaaatatttacacttggtttgcccatttgtgttttttttaaaatctatattaaagctaggcccaaacatggccaggcatggtggctcacacctgtaatcccagcactttgggaggccgaggccaaaaaaaaaaaaaatttaggcccaaacaatttaatagatatttaagtcctgatagcagcaactatttgggggaaaaatactcataaactggaagaaaaaaataatattttttaaaaattattttcttttttttttttttgagacggagttgcgcttttgtcacccaggctggagtgtgatggcacgatctcagctcactacaacctccacctcctgggttcaagcgattctcagcctcagcctcccgactagcagggattacaggctcgcaccaccacacccagctaatttttgtattcttagcagagacagggttttgccatgttggccaggctggtctcaagctcccgacctcaggtgatccgcccaccttggcctcccaaagtgctaggattacaggcgtgagccaccgtacctggtgttaaaattcttaagtaacaacagttgcttactgatggaaagtatgccactgctgttctcacacattggaatcaaatccgacactgccaccctcatttcctgtttcacattgattttcttgagatacttctttttatcatagcaactgcgaaaaacccagctttgcaaagatgagatattgctaataggaatgtagcacaatctaatgttaataccattaactacctcaagctaataatttgggtgatgttcaacagatgttaggcattgctgtgtttcccttcatgtaaaatattctgtctctgtgagttcaccacagcacccccgggcttgttggcacacaattttggaaccactggtgtaactactttgacctcagatactcagagaagtgcatggccactgccgtaatctcaggctctgcttcctcaggatgttcagttcggtggatgctcgactgataaatacagcaaatataagtcaaaccatcatcattggggataatgaagatttgaaaaaaaaaaacctaacatttattcctatagtactaaaatcttgaggatgaacattaatactcagttaattataatatagaatgccatgttgacaatgctgttaacagtaattttcttatttaatatttaaagttatatgaatctattctaaatatttctatgatatgctctatttttcccctataagtatgtcttactatagtcttcatctcttttagtggaaaaagatggaaaccatcatacaagagaaactcacttcaataatttgtatagcatggtacattactgtgaaaatataacrgaatkcaggagaatacagcttttggcctactttggtgaaaatggatttaatcctgatttttstaagaaacacccagatgtttcttgtgataattgctgtaaaacaaaggtaaaaaaagaagttttaaaattcyttataattaaattttttwtctcttactttaaaaatgtagatacaaattagattgcaaaaggtggtctccgacagattaacaggggaaagacagcttccttccagtagtaatttggaatggaaacatttaaaaagtaatttcatgcggtatcttttctttataattagaaccctgttaaaaaatataatggacatcagcatatccagaatattgagtttatatatgtgcactgatgattacagaatattttagaaatattaatatgcaaacatccaaaaagatccaacatgggcaggtagaatattttaaatttaatatattaatgttattaatataatacattatattaaaaatttaattgattaaattaaatatattaaaattgacgtattaatatttaatattttaaatatttaattaatatactaaaaatctcattctcaaaagagtaataactagtgtaccgtatgtttgaattcaaatcaattacattactctttttttttaactataaagaataacagtaactgcttgtggataaattcactattatctgtcctaaaatacccttggaaggttgttaaattcagtcattaggtacttattttacctatcttggtaattctacattttaatgtctactgtaacctactgcttactgagcattttcacgtttggtgtattatttacctatctgggagtattagacttatatgtgcaagatgctggagagccacaagtgaccatggtatggaccaattcatagactggagtggagaccgacatacatgtgttcatagaagtttaacactctggcttggcgcagtggctcatgcctgtaatcccagcactttgggaggccgaggcaggaggatcacctgaggtcaagagttcaagaccagcttgaccaacatggtgaaaccttgtctctactaaaaaaatacaaaattggtcggctgtggtggcccatgcctgtaatcccagctacttgggaagctgaggcaggagaatcgcttgaacctggtaggtggaggctgcagtgagccaagatcatgccattgcactccagcctgggcaacaagagcgaaactccatcaaaaaaaaaaaagtttagtactctcagtaagtatagttaaaaaatacrgagcacagggcagaacagagggtagtctctctcagtgtggaactggcaaattcatgccatctcctcccaccccaccccatcccttaaacattgctatcagttccctcattcaacagatatttgttgggctgtgtaacaggcactgttgtaggaatttgggatacatcactaaacaaaatgaaaatccctgcccttgtggagcttacactctagcagagggaggccagttacaaacaatatacacaataaatatacrtgaaaggataagagctgtggtgaatggcacagcagagtaaaaagacaggaggaatgggtagagtgcaggatgcagtattagacggggtggtccttggaagtctaactgagaagatgggagctgaggaaaatcttgaagaagggagttagctggcagctccctggatgtgagctttcctgcaagaagctttggctagagcaaaggccctaaggtgggggtgtgcctggtgtgttcgagagatggcaagggagcccatgtggctgagcaggattaagagccagtgaggggaagaggtgatggagagccagagcagtyagttgagggctagagtcccagagtaactggaggcctgagtaactggaaggatggagttatccttggctaagatgcagaaggctggttggcagagaagatcaggagtttggtttgggttacctaaattgggaatctaatattgaattacatattaagattcaaaaattctgaaaacagactggtggcacatgggtgatatttaaagcatggccatcagctgacagtcgggataagagaagggacggaagagaaaggagaaagtatgaaatagttgtctaggacaggggtcagtaaacttgcttttaaagggccacagcataaatattgtacacttcgcagccatagtctctgtcacaacgactcacagctttgccattgtagtctaaatgcagacataaataataaatacaccaattttctagtcatcttccatggctgtgttccaataaaactttatgcacaaaaacaggcatccagctcctgggccatagtttgctgacttctgttgtgagagaatggaggaatgataggctagggaagtataaagataatgattgcctacagcattaacagtccattcgagctttgtggccacgtagtgacagtgaaaatgccaagttcagccacataggtacagggacctatggagatggagaattggatccattatgttttgccaggtaatatgttgaagtgatctaagggcaagagagctgagggtctatgagaggtagtgattataatgatcgactggaatttcagctgagttaggaggacatctgaggttgaggatcagcagatgggcattcccaggggattgttggagtcagaataccacatggtatgagttggaaagataggatgtggtggtctgagaatggaggagttgccattattagtaagcttaaggtaggaagtgtgagcggctgatgtatgtggaggacaggatcattggagcagaggagatcaagaaccaaaagaccaaagtaagaggatcagctctgtatacctaatcaccaagaattaaggtagatggccaggtgcagtggctcacacctgtaatcccagcactttgggaggctgaggccggcggatcacctgaggtcaggagttaaagactagcctggccaacgtggtgaaaccccatctctactaaaaatacagacaaattagtcgggcatggtggcaggtgcctgtaaccccagctactcaggaggctgaggcaggagaatcgcttgaacctgggaggtggaggttgcagggagccaagattgcgccatcgcactccagcctgggcgacgagcgaaactccatctcaaaaaaaaaaaaaaaaaaaaaaaaaaaaattaagataggaatggagtgacagggcactttttcttgatgactctagatagggcctcagaatcacttgcagttgttagtgtaagaccagaaacctgttcatctccaggttattggtgtgtgcaaatgacaaggattagaaggtagggagggctgcatacacagaagcaccaagcatgatgcagctttttacacctgtgagtggtcagtattgatggtagagagaactaggggagagaaaggcaaaaagtcatctagtaacggggactctaaaaagtgggcaaagtttggggatagctgaaggaaatgagaaaggaaactrgcaggagatgatgaaaagagcgttgactatggcaccaaagaccccagaggggttagaatccgtggatttacrtggcaccscacaggttcccacccagtatgtaacagagcactattctaggaggcatggaggatttaaattgtgtgtttgtgtgtgtgtctgtgtgttatatatgtgtttctacccacagagtgctatcaggtagttgaaagacaagacgtatctctgtgaaacagtaacaacatcgagtggtagttgttctagaacttagataagaatgaacatttgaaatttccgtaggttttggtctcggtattggtctggaaatgggttatgatgaatctactatagttaatattaaaccctagtaatctaggcattgttaccttaattatagcagaaagtattctctttttattcataggattataaaacaagagatgtgactgacgatgtgaaaagtattgtaagatttgttcaagaacatagttcatcacaaggaatgagaaatataaaacatgtaggtccttctggaagatttactatgaatatgctggtcgacattttcttgggtaagtcatctgttttgaatgtttgagttacktcaattgaaattgaacatctaaagaatttattacaagtacatagaaaaactttttgtctattttcttataaaacttgagtttctgaataaaacttttaagtaacaaaagaaagtcaattattatactgttttatatmatgtrtatgtcactaagttgagatggtttcacatacaaagaagaaaataataaagcttatgcgagttcatctgagtgggtggaatgtaactattaaaatgtcagtaaggaaataaaatgaggattagacccataacagcatagagaataggagagagactattatcagattagtgccttaaaaatctctcaggggctgagcacagtggctcacacctgtaatcccagcactttgggaggccgaggcgggcggatcacctgagatcaggagtttgagatcagcctggccaacatggtgaaaccctgtctctactaaaaatacaaaaaattagccaggcatggtggcatgcacctgtaatcccagctactcgggaggctgaggcaggagaatcgctagaacccgggaagtgaagactgcagtgagctgagatcgcaccattgcactccagcctgggcaacaagagtgaaacygtgtctcaaaaataataaataaacaaacacacacaaaaattagccaggtgtggtggtgggcacctgtaatcccagctactcgggaggctgaggcaggagaatcgcttgaacctgggaggtggaggttgcagtgagccgaggtcacgccactgcactccagcctggcaacagagtgagactccatctcaaaaaaagaaagaaatggacagtaaagaggaagaccaaataaatagaatatttgaccctgggtgatagaaataattgaaaatagtagtttgggagagaggggagagaagactccttagtatcgtcttaaagagtttttaaaataaatacttaaataataattgaataatggaaaagaaataaaaatgagaaagagctgtcaattttaaatgattgacaaagtaaatttagtggagaggttggaaaataaagtcaagaaaatttaggaactgatcaaaatgatatatggaaaatagagaaagcatagaaaggattaatcctcagtagatgtaaaatctgacaaaaattttggaaatagaaaataaagggaattatcaaaccaatgatctaggaaaacttcctagagtggaagagataaaagttttggattaaaatgctcactgaatgccaaataagatgcctgtaaaaaaaaaaaaaaaaaaaaaaaaattaagacatatggccacgagatttgagaatactaagagttaaagacatgtcaaagaggaaaaacttttcctcaaccctcttaggttcagtgatggggcctgcaaattaaaccaacaaaaaacagattagcaagggaaaagacagatttagtcatgtgtggataggagttcacagaaaaatgtggttcaaaggggcagttagaatgtggggcttatataccatcttaatagaggaaggggagaaggaggggggcacttatggaaaaacaaatgactgttaggaaagacagatggactgttaggagaccagatgggagatacaaagtttttatgacaatgtctgtttaagtgtggtgtgaagtcttatctctgtttaaaagggtcagccttccctggtttttcccagggaggcaatttatgacaactgagttcttttgggaggccctgctttttggcagataagagatttcagatgccttctgctcaaaataatttttatgccacagtggcatattctgkaccccttcagagacaattctgaaagctctggaaagaaaacaggaacccaaaccagactgacatcagcttaatatcagcaatcctggagactagcaggcaaagaaagtgagcacaggtcgtgatttgataagtggtggaacccacccatgggtccagtgaagaaaacccatagtcacagtcaggcagcagggccagtaagcaatctatgcagactaacaaaagtcaggaggaggctgggcacggtggctcacgcctgtaatcccagcactttgggaggctgaggcgggcggatcacaaggtcaggagttcgaggccagcctgaccaacatggagaaactccgtctctactaaaaatacaaaataagctgggcgtggtggcacacaccagtaatcccagctagtcgggaggctgaggcaggagaattgcttgaacccgggaggcagaggttgcagtgagccaagatcgtgccattgcactccagcgtgggcaacaagagtgaaactccatctcaaaaaaaaaagaaggaacagggcccacccaacgtagagagagagtaagaaaggaatggttttattgataacagtgaagaatgcaaatgttacttctcaaccaaaaaaaaggagagaggcccttagaaactccagggaaaagattatacaagagagcaagatcaaatataaaacaaaggaagttgtggccaggcacagtggctcatgcctgtaatcccagtactttgggaggccaaagtgggtggttcacttgaggtcaggagtttgagaccagcctggccaacatggcaaaacctcatctctacaaaaaaatacaaaaattagccgggactgatgttgtgcacctgtaatcccagctacgcaggaggccgaggcagaagaatcacttgaatctgggaggcggaggttgcagtgagctaagatcgcaccactgcactccagcctgggtgacagagcaagactccatctcaaaaaaaaaaaagttggtaaaatgtacaaaaaagtcatccatttgacatgatgggtaaacattctccttttggttccataagagtcatgacattgttccaattagggaaggaaatttgtcatcatgtaaacaacgattgaaatcaacatacagacctaaacaaggttacaggacagaacaagatgtaaatgttaatattgatgatataaaagtaaaagtacaatcgctaaaagtaaaagaaggcatacagggaaggcttgggtactaatgacatctcacattgtgggaaggggtagtggtcagaagttctattgaaagttagaaacataattagtacatgacccaacagtatcatataactagcaaaattcagagaagaataaaacaaagtgggggtggtatgaatgagataaaacctcatctttcataataaaggggcaaggacaatagataaatgtcaggcttttggacagaaggcaagatttcaggtccttctgtgtgtaggtagccacctgaagagctgaaaacaaaaactgtttaaaaagcgattcccttggggaagggaaggatgagtcaggggaatgttgcttttaattataaacctttctgtctgggtacagtggcccatgtctgtaattccagcactttgggaggccaagacagacggattgcttgagcccaggagttcaagatcagcctgagcaacctggcgaaaccctgtctctaccaaaaatacaaaaattaatcaggcatggtagcacgcacctgtagtgccagctactccagaggctgatgtgggaggatcacctgcgcccatgagatcgaggtggcagtgagctgtgatcccgccactgcacccccagcctgggcaacagagcaagaccctgactcaaaaaaaaaaaattgtatttcagccagctttcgtagttgtcctcagcagtaaggttggtccataccattcagcctatcattagcagaacggtagttctgtttctataatgtggcctttcagggatacaaattacttaaagaaaattttgaataattcaggatatatggccagaagccatttgaaatggacaataatataattatttggaactctttaaaacagagctaaagctttacgtaataaccattaattctgatttttataaatgtcacaaggtctcttaagtagattgttacaataaagttgtgtttataatgaagacattagcagtcacagcagcttatgaatgaaacaaaggatccagccaactgtggctctcggctagtaagagaaagagggaagtgtgtgtacatattcctgtcttcatctctccccttgagcatcttatagggtgttgtgcttttcttttagaatttgaataggcttcattagtgagggtgacaaaaagaatagacttaaatacttggattataaactagtagcagttttgataaccagggccagggatcatatttagaaaactgactgtcaaaaattgtttgtagccaggctcagtggctcatgcctgtaatcccaatactgtgagaagccagggtgggaggactgcttgaggccaggagttagagaccagcctgagcaatgtagtgagaccctcgtctctacaaaaaaattaaatattataaaataatgtaaagagtgtcattggattgtttgcaactcaatggataaatacctgagggaatggatggcccattctccatgatgtgcttacttcacactgtatgcctgtatcaaaatatctcatgtactacacaaatatatacacctactatgtacccacaaaaatttaaaaattaataaatactagatgcacttaaatatttaaaatttttaaattaggtgrgtgtgatggcctgcacctgttatctcagctagtcaggaggctgaggcaggaggatcacttgagcccaggagtttgaggctgcagtgaaccatgattgcaccactgcactccaacctccacaatagagtgagaccctgtctctaaaaaaaaaaaaaaaaatgtagataagtaatgcacagttatcctaatacatagcacagtgataggaagctattatggtttatgtaaactctttctttgatttatttgctccaatataattttgctgctgttttttgtccatgtgtattgtaaaaagataaggaaaagtacatacaaccatagaaattttagcgttctactcaaatactctcatttaacagaaatgagtgtctgtgccaggggtttgtgatctattccatctgtccaaacctgtccataaatgactttttagcctcttctatttgagggtgatgatatacgtacatttactcatcttacttcctgtatcttcttatcagggagtaagagtgcaaaaatccagtcaggtatatttggaaaaggatctgcttattcacgacacaatgccgaaagactttttaaaaagctgatacttgacaagattttggatgaagacttatatatcaatgccaatgaccaggcgatcgcttatgtgatgctcggaaataaagcmcaaactgtactaaatggcaatttaaaggtatagtatttttcatgtttattttattatctcacaatgagtgaaccaaaatatattattgtgaagtatagtgtctttgtccaagcttatagatactgaatttatatatactgttctatacgaacatattctgtttttcttaaattggaaagagatcttaaaattcaacccaagtaatatgacacctgtcaaaagtaatttaatgggttatcaggtcactaaatctttatatattcattaaagaagcatttatcaagaggctattctatgcttgacactggagatacaaagatggagaatgcacagcccctgttcccagtgggctcactatctgcatgacagaatagaattrccccccaaaaatgcaattaagcattaaataaagcccctgtatgggtacaagtgcacatatacccactcctatgatttgtttctctctcataaaggtagactttatggaaacagaaaattccagcagtgtgaaaaaacaaaaagcgttagtagcaaaagtgwctcagagggaagagatggttaaaaaatgtcttggagaacttacagaagtctgcaaatctctggggaaagtttttggtgtccattacttcaatatttttaataccgtcactctcaagaagcttgcaggtgggtacacatgtatcctttgttacgtggcacagattaataggccgaaagttaatcttgctagggaactccttaagtgataaatatatctcagtggtttgtttctttttggggtttgttttgagacggggtctcgctgtgtcacccgggctggagtgctgtggcrtgatcatgactcactgcagcctcaacctyctgggctcaagtgatcttcccacctcaatttcccaagtagctgggactacaggtacacaccagcatgcccagctaatttttgyattttttcgtagagacagagtttcaccatgttgcccagtctggtctcgaactcttggcttcaagcaatcctcctgcctyagcctgccagagtgctgggattacagataagcatgagccactgagcctggcctcagttgttttaattatttttatttaatctctggattaaaatctcagagaaacaattgaaacttattctttttttgtttgtttttgagacggagtttcactcttattgcccaggctggagtgcagtggcgcgatctcagctcatcacaacctccgcctcccaggttcaagcgattcttctgcctcagcctcccaagtagctgggattacaggcatgtgccaccacgcccggctaattgtgtatttttagtagagacagggtttctccacgttggtcaggctggtctcaaactcccaacctcaggtgatccacccacctcggcctcccaaagtgctgggattataggcgtgagccaccatgcgcggccgaaacttattcttttttttttaaggacatctgaagaccattgaatattaaactcattcttaagataaaatatgttctttaacatatatatagtactttgttatatatggtataatggtaccctatgtatgttatatatggtataattttaattatagctctgtgcctatatgaaaaatacatataatcaaagtaaatggtgggtgcatgcctgtaatcccagctactcgggaggttgaggcaggaaagtagcctgaacccaggaggcagaagttgcagatatttgtatataacacagctaaacactataaggcaggcaaataatcggcacaaataatgaagtgatgtctggttttagaaattacaatgatctggccggacacggtggctcacgcctgtaatcacagcactttgggaggccaaggcaggtggatcatgaggtcaggagttcaagaccagcctgcccaagatggcaaaacccgtctctactaaaaatacaaaaaatcagccaggtgtggtggtgggtgcctgtaatcccagctacttgggagactgaggcaggagaatcacttgaacccgcgaggcagggtttcaccatgttggccaggctagtctcgaactcctgacctcaggttatccccctgcctcagcctcccaaagtgctgggattacaggcatgagccaccgcatccggccggattattgtaatttctaaaacgagacattacttcattatttgtgctgattatttgcctgctttgtagtgtttagctgtgttatgtacaaatatctgcaacctccgcctcctgggttcaaacgattctcctgcctcaacctcccgagtagctgggattacaggcatgcgcccaccatttactttgattatatgtatttttcayataggcacagagctgtggataataaaaatcaatgtccaaatcagtaaaaaaaattctttcaataaaagcactgtgtcatagtttaattagcagaattttttyttccttaatagtccataaaataacrgtwtcttaawawagttggcatcttagatccaatgaaatattgtaatgaccaattgtaatattgtaatgggctgggggccrtggctcacgcctgtaatccctgcactttgggaggctgaggtggacggattgcctgaggtcaggagttcgagactagcctggccaacatggtaaaaccccgtctctactaagaatacaaaaattagccaggcgtggtggcgggcgcttgtaatcccggctacttgggaacctgaggcaggagaattggttgaacccaggaggtggaggttgcagtgagccaagatcgtgccactgccctccagcctgggcgacagagcgagactccatctcaaaaaaaaaaaaaaaaaaagtctgcaatgaagagctagtttccttatgaagagattatgttttatgcttctttgaatctggatctagcacactgctatgtctttagttaataaatacttactggtctgagttatttccatgggcagatagcccaacccagaatttcagtagtagagttcctggaaaacaacgtcttcatatagttggccagctgggctatattaccttccatattcttcttcataaaatctcataatcatcaccttctctcttcttcattccctctcctacgataatcggtcattacaatatttcactgactctaagatgccaactatattaagatactgttactttatggactattaaggaagaaaaaattctgctaattaaactatgacacagtgcttttattgaaaraattgtkttttactgatttagacattgatttttattatccacagctgtgtgcctrtatgaaaaatacatataatcaaattaccgtaggtacttataaaagttcacattcaaagcctgactcttctgagtcactttttgactgagtcgtccatgtctttgtttttccctatgtcatcactaacattctcattagccataaggcatttccagagtgttccactattttccccaggatttaatcgaaatctctgttatcagttctgttttgaaggtggtggtttcttgatgataccagaaggtgtcaacagaaggttgtacatctctcagtaacaaaaatgtagtgcggcctcatctactttgggcatcttctttcttaggtcacgtaaagcacttggttgtacttgcgagaaactatggaattgggggcctgtgtcctcagagacaaatagtgcctgggttttttttgttttgctttgttttgtttttttggagataagatcttattctgtcgcccaggctgggtgcagtggttgaacacagctcactgcagcctagacctcctgggctcaagtgatcctcctaccccagcttcctgagtagctggaactacaggcatgtaccaccatgcttggctagcttttttatttttttgcagagacagggcctcactgttacccagactggtctcatactcttaggctgaagcaatccgccctgtctcagcctcccaaagtattgggattacaggcatgagctaccacgctcagccagatagtgcttttcttaataccaaatgtattccctgctactctgtttcagaacttttctgcattcacaatcacttttttaatgctaatcacagtatagtctttttgaagacatgtcatggcagttagactcaatacatgaggtacaaacagtgcagtgactttgttgacatgmtgacagtactaatagctatgactaagttctcacaagcatgagcagtaacaaccgcaaggcagctgccatttagccatcagcagttctaagacatatcttgacctcaggaatgctaaattgtgaaaaggtgtgtgtcttagaattgatgaaatttggtattttatgatatgttatttctaggcgattagtgtagtttcttaactgtcctccttacctccagctgtgaatgtgatgtacattttaatctttcaaaacctagtaaaactacaacagcttcccagataaagtatacattttatcaagggtctacatttcttcctgcctctcctactttatctttcattaaacccccttcataaaccttctgttctgtccacagtctcttgcttttcctctaaacatgggaatgatgtgaaaatcacagatgggaaaggatttgaaatccactctttgctcagctcaaatacataggaatggttactccctcactacccagagccagtgcatcagtcagtcctacagagccagcctccaaaactcacccaagcttgcttcactgtgtctccactactgcattccagttcactccatcctcactcgctcctgcaatggcttccaccaggctcccggattctactctttcctttacagtcaagttcttaaacagcagccagggtggcctttaaatgacaggcttgtctagctgcaagactgatatgcgacctctatgcagaggactcagctggctgcttgttgcctcaacccmcatggggaaagagtggaggaagaaaagtttgtgctggaggaagtaacaatttggttatgccrtctagggtggggtgtacaagtctggagtgcagagaagaggctggagctggaaatagaaatgcagcgttctcagtaaagagagggcacaccagtctcagctagatgagtactggccatgggaacagtgggcaagagcagatctgctccactccacgcacatggcacaggtcccaccctcagcttcctcctgccctggctcttgcccttgctctgccctggcctatgccgctggaattggatggtgggttcctgccctctgtgcctgtctgctgcctctgaggtgctaactttgccttttacaaaattggcctgtgttcccagtaccctgcagttagttggcacttagcagacgtgtgctgaatgcgtgaatgagcctgaattcagtgggttttctatgggtgataatttaaattcctaattttatgcctttgcacagaatctttatcttctgatcctgaggttttgcttcaaattgatggtgttactgaagacaaactggaaaaatatggtgcggaagtgatttcagtattacagaaatactctgaatggacatcgccaggttagtacacagccatgtgtgttctctaaaagcctgtttaatgtgaagcgacgcgtctcactgaattagaaggatgcagttgtgtgaatgcttcctacacctcgtcacactgacatccaagtcagcccccagtggtgtgccagtcacctctgagaggacactagtgcttatgccccctgtgagtgccagttctgaacttactcataggatccaaaaggggacctttgggcccaggggttgctggttcccgtaatgcaagtgctcaagggatcagagccctgggtrccagttccagatctgccaccacgtcatgctgtgtggtctctagcaggccaccaatagcctctttgtgaatcaggttcctccaccaaggaaggaacatgttatctgacaaacatgtctaaagataaaatttaagactagtgtttaaatgttttrgagaaatgagcatgcagctagaatgttattattgttagtcattgatagaacctgcctgagtgcatcattatcagacgttcccggagtcacgttaggcctgtcctgtggcacttctaatcatgagcttcatcatcattacagctttagaaatcattgacctgggggaaatgagaacaacaaagcattttgttrtaggaaatattgagagcacagaagtcttctgccctctgataacatcaccacgtaataggacacaacagacaggcccggttcagtgttcttcctgcttccagacaggcagtgtgggggtcttcccaaggatgatggaaatgatgagcaggatgagatagttcaagttctctctttacctagtcgcttttttttttttttgacagagtctcactccaggctggagttcagtggcacaatcttggctcactatgcctcccagattcaagcaattatcccacctcagcctccccagtagctgagactacaggcatgcaccaccacacctgacttatttttgtatttttttggtagagwtggggtttcactatgttggccaggctggtcttgaacttacgacctcaagtgatccacctgcctcagcctcctgaagtgctggggttacaggcatgagccaccacacctggtyaggttctcctaaattcttcyatatggtaattagtccattaaaagccttgttccgaatacattttgacagtgagccagggttggagcagccatggtggagtcctgtgccctccatgctgctcctgtagggtggcctgtaggacaaggcagaccagccaggaaatggagactgggtccccgtgtgasctatctatagggaggtttcatgctttttgggtgccttgggatgcaaatacttatggaaattaccatcttctttgcaaatgtgtgctttcatgcggtctcacctcccgcataatatgtgacatgttcagccatattgtgcaaagacaagtttttttgtctgtaaagagtaaaataggatctagaattttcttatgttcatttactaagaaactattgttcaaagatgagatacaggaccgtttgtttcccttatattgagctgattttttcagcacatttaaaataagtaaaattgcctgccatctttatagcagttgatactttttgaattgcctaccagaactaactgcccaatcaacaacaggaacacaggccatatgcgacagtatgagctaaacctcatgtctctagttaacttcaagactatcacaaatttttttaatgaattctgattctcttttgttaaaaatgaattgccattgaacactttggggctttgtgcagtaaaaaaaggtttggttcttgctgaattgttgaatccatatggcagggaagcagctaggtatctgctaaaatgggcccctgcagcgtgtctcttcatatacactaaaaacacgtggaccagtgygacatcacctgtaaacatctgcattttccatttgtagctgaagacagttccccagggataagcctgtccagcagcagaggccccggaagaagtgccgctgaggagctygacgaggaaataccyrtatcttcccactactttgcaagtaaaaccagaaatgaaaggaagaggaaaaagatgccagcctcccaaaggtctaagaggagaaaaactgcttccagtggttccaaggcaaaggggtatgttttgtgacatctttttcaatatagggaacaagggaagaaaggacaaaagtgcaacagctctgccttgctttgaaggatttattaaaataagccattattaaatattgctaatggaatgacagttgttaatggagtgacaattaaggtttgatccaaaacaaaaatatttgcttcaagaaacaacaaaaaatatttgcttcagatgtttaaaacatctactgactaatagttatgactaaagttttctttctttttttaatttgaggacaaagtctgactctgttgcccaggctagagtgcagtggcacaatctcggctcactgcaacctctgcctcctgtactcaagtgatcctcccacctcagcctcctgagtagctgggactccaggtgtataccatcactcctggctaatttttgtattttttgtacagatggagtttccccatgttgcccaggctggtctcaaactcctgagctcaagtgatcagcccactttggtctccccaaagtgctggattacagacgtgagccaccgcactcagcctgactaatgtttcttgtttgcaaagatgtcttccatgttgatcttcccttagatatttgtttgcctgtttgggatgattgttcttcttaagagacttttccacctacaatactataaatcatacactagctgaataaataacaaagggttttgtgtcctcgtggcttttactattctgtcagtacttgctccgctgcttttattgctgcagaatcccatggatctccaccttgargcacgtgcacactccctgcctttcattaacacctgggagaatcgacctcccagcctttgcagrggtagcaagaagaagccacaacagagaaaccaaaagttcagtcaagccaggcctctttaggggttgcgtaaatggcttctgtcttccccttcccatgttttcctgggccgctcgtctgggacwtgtctgttctgggcgctttctgcacaccaggggaacaacaaagacagcatggtctgatatgtgtgatgatcttggcagtttccttctttcttcataattgcattgtttctgacagccgcttttygattttctgccagggcaccctctgccttctggctagtaggttaggcctggcaggagggagaccattccatcagtcttgagaacttgaccccaaagtaactgtatattgtaacagagttgcttgcagaaaaaagaaaccaaaaaaaagtccacagtcaacttttgcaagctgttgtgttttcttttgcagtttttctacctcttgtccttctgagtaataaaaaacaagaactgagtggggaaagagaaaggaaggcagacattaccaaattgtcattttcttgttaagtccataaacaaaatcttgtatgtgctaatcctcctgccagagtaccgaaattaaaggcattagaaaacgttagtttaattttgtggttttgagtgcgcaagtgatcagtaagtgctcttcagtgagaacattttcttatttccatcatttattcctccactttgggaaatactcatttcctcagtaactcacacagagccggagaccttaaaaggcatctggctcaacacccmgggtttttgaagaggaagcttaggcctggcctggggagggcttatcggaggacaaccctgcctggtctcgatttcaaaggtagaagcggacactggcctgcccacacctgcccagagcacgttcacttctgcatgttgcctgtggagactcctaaaaaacacgcatggtcttccatctcatctttatgtattagaacaaagcaaaccatattgctattggctcccttatttaattttcacaacttttgttygtaagagtgaagcactttgcagcatcatctggaacctaatctgataagaagcagtaaagctcacacttgtacccatttccatgcttgttttcagtgagcctgggtgtttaagatgggatttgttgttgttgttgtcgttatggagttttgctcttgtcacccaggctggagtgcagtggcaccatcttggctcactgcagcctctgcctcccgggttcaagctattctcctgcctcagcctcccaagtagctgggattatgggtgcacgccaccacgctgggctaatttttgtatttttagatggggtttcaccatgttggccaggctggtctcgaactcctgaccccaggtgatctacccaccttggctcccaaagtgcygggatgacaggcgtgagccactgtgcccagccaagatgggattcttttttaagccctaccagctaaagccagtgcactgtgtgactttgtgttacccttggagcagcctctttttgctccactctcctttccaccgacccagtstgctccccggattgagagtccctgtgcagtgaaagaataaatgtggctctctgccagcaacctcacctccccaccctaccctcagagtttcacatcttcagaacaacacacaatgaaccagttgtgttctgggctctctgagtgggagtaaatggatggcccaggtgaaatggaggctgctgttggccgattcattctgtaaatcaacataaacagcaggttttctctctgggcttaatttctcagcaggaaatcagcatagggaaacttcaggctgcatctctgccagtctagcagatctctgccagttctgcagtaaaactgccttggagccagagtttaagtcatggagctccatcagaatgtcattacccacaggctgtggccctataccctcaattcagacgggaggctacttgtatgccctggtgccgtggaattagtgtggggcctgacatcagccggttacagagcagcaggaaaggcttctgcgggtaatgctgcccacagccatcactgtaaacatgccggccccatggttttgtttgtttttatttyayttaagggtgggaagggagctgttatcttaaggtctgcaaggaaagtgagatgctggaaggacttggtaatcggctctggcggcttcttccttggctttagaaggcagcgagtgggagggagagctggcagatctctgggtgtaggcaggtgagccagggagctgctggacacggtcctaacagaaggccgcatctgcagccttcctggggcttcctggggctggccaggaagacgcccagctttgccactcctggccacccagctccaccccatgcatgctcaccccacagctgccttgctctggactgtgcaagtccagtcattccggggtgcctrtcagcarggagctggggccttacagcaaggtgtttcacttcttttatttggtcagaatagatgaggacatgtggacctcagctcctcttgcaggctctggttgtaggctgccgaaggtgtgggtggagagaggggcggtgggttggtcacaagtcagaaaattaagaaacagtcctgcacatttcagaaagacaaatccagaacaaatttatatgaagggccgcggtcctttattccataagtagtaaaggaaacttaccttacctagggggctcgtaggcagaaaatgcacaaggacacattaggcccagggaagtggtattgtagctctgtgcaggttgagaggraggtcattcatttttggtttcatttaacattttgatttttttctttgtcacatttcagggggtctgccacatgtagaaagatatcttccaaaacgaaatcctccagcatcattggatccagttcagcctcacatacttctcaagcgacatcaggagccaatagcaaattggggattatggctccaccgaagcctataaatagaccgtttcttaagccttcatatgcattctcataacaaccgaatctcaatgtacatagaccctctttcttgtttgtcagcatctgaccatctgtgactataaagctgttattcttgttataccatttgaagtttttactcgtctctattaatatttaaataaatgctggggggtgatagttcttctttttaaaataaacattttcttttgaataagcatgttttgctgccgctgcaagtgttgtggccgttgtttctcagaacgtctgaggcagcagctgaatcatctcagtgcaagagcttctgagcataacacgaaacccagaagccaaaggaagagccacgcgtgggcccttgtgaaactaaagcttttcgtgtaagacaacacaaacaaaatttaaagacaaatgacggggaaaagaggagaaaatatattacaaaggattagtatccatcataccaaatacccgtgaaccagtcagaaacatcccagggggcaggtggaccaaggatgtgaacaggctagtctcagaagaagaaatacacatgctcatggcccggcactgtggctcacgcctgggatcccagcackttgggaggccgaggcaggtggatcacgaggtcaggagtttgagaccagcctgcccaacatggtgaaaccccgtctctactaaaaatacaaaaattagccaggcgtggtgtacaggcacgcctgtagtcccagctactcaggaggctgaggcaagagaatcgcttgaacccaggaggcggaggttgcagtgagccgagatcgtgccactgcactccagcctgggtgacagagcaagactccgtctcaaaaaaaaaaaaaaaaaaagaaatatacatgctctgcaaatatgtgaaaaaggtcaatctccatgaataaaaatatgataaaaccatgtgagaccattcttttgcctacaaattatcaacactggataatatcccagtatttggggtcagcgagaaagattggcagattgtttgggtggacgtgtgtggcagttgctgtagtcctttggtattgtggtggcctcgtttttcaggatgctccataatgggccaattggccccagcatctttggtaggattttggcctctcttgcctgaactccagtggccccattttcggagacatgcgtttctcagctgtaggtcacctttgtctgggtgccacacagcgaggaagtggcataagacaaaacacacacctcggcctgccctttgtgtggtgttacctgtgacgttactcaggagagtgtagctggggagaccctgcctgtgccaaagccaaaggtgtgaagagggggttgatgggaagccgtgtggcctctgcctggggactcagtcctgagagggaccctgcacccaccctgaggacccacccttgtggtagcacactgacttcctgcctcctcggctgcctgtgagccccaactgccgcctgtgggcttttggctccgtgtttaatgggggggactggccaggcgagtttgctgagggctgagtgccattagcacggatgcgttccggatctgacattttcagaggtcatccttctggccagaagaaccttctctgtgcatgagaagtggaaaggagacaaagtagccagaagttgatacccctggggtaatgtccccagcatgaggccaccttggagagttgctgatccagccaaggcatctggcaggaggcatgtccgttccacctgctgcagcagctctggccttggtggtgggggtggactctggcacagacaggtcactgctgggctctgacctcatccactcgttccttctggagatggagcttatccctcagggtcgcaggctgtgcctccaggagctcccagggctgtgggggaacagatgaaaataacgtgcatggggcctgaaggtggagagcagagccatgtggggcccacactacctacagcccttccccatgtcctgggaagatgataggttgacccacccctgcctcccagcaaggaacctgaggcctagagacctctgatttgcctaagctcaaatgaccacaggtggcagagccaggccccacacccaactcttgaaaacattctaggttggaacaggctctgctcagtttctcaggacccgggagcaggcacagaaaatgcaagcggcctccttcctccagctcatcttccagtcctctcagacccccagggaagctctgcattcgcccagcgcaaccccaggagggcaggagcaggcaaactttccctgaactgatgccaaggctttgaagccaaagaccggtccatgatacagcaaagctgctctgggctgggccctgctggtggccctccatggcacaaatcgccaccacctgggataggagagggcacaagtccaccaaggagtgccagcctgggacccatcacgggcccatcctcccctaggtacacgaaggcctgactctcccacactcacttgccatccttctggagggcacaggcaggattggaatctggctctgtagctgcacatatgccctgctgaggccctcacactacagaacgctggcaggcaggcccttgctcacctccagggacagagaacccactactctcagaggaaaagaacaagcacggagagcccctcaccccaccggctccatgccaagggctgttttgggaactcaggtaattcacttcttccatccctcccgcagccctgggaggcaggcacatgatgttggccttttttatgcagaaaccagaattcagagaggttatgtaacttgcccaaatccacgcagctgggaggtggtagtaagtagggtaacacacatctcgatttgccctggagtcccagtttacatccattgtcctggtgtgataattaacacagtttattttcattctcaaaagtgctccagttcagacaacaagttcagtggcatcaagaatctgagctctttccctgaactatccaacctcttctcccaaccccgctttccacccagagcctcaggggccacctgctgtcacctgttcgaaactcccagcctctgctgcaggctccagggacagaggctgcagaattatcagccagcatcgctgagctgtggcttttctccagaagaggaagcggaggctgtggtccaagccttctcgctcttcttgagaaactgctgcttctcccactcctgcagccgtctggaactgctctgaggccccgaggcccaccctgtcctttggaggctcccagagtcccagcccggctctttctctggctgggagctgctgcctgggtggggagcagcaggcagcagctgtcaacctcccccagcctgggacccgccgctggcagaggcctctgggcagagacaatgggcgatgggtcttctgtggcagctggggaggaatccccaggggctccagcagccacttctccctccgtgcagctggcacagccccgtgtgtcctcaaagccagggctcagagaagccagctggtggggcgcacccaggggmcccgagcctggcccagaccctgctaggtgctccagttcatgagtgcagcaaccactaggaggcaggggctcaactctgcagctgtgcagggcagacccaggacttcggggacaagcccctcggcatgcagtaggctcctgctttccaaaacgcactcactctgcttctcggaaaggcttctcggctggcccacgctccctgttggcaggagacgaaggaggaagggagaaaaccctccctggttggggtgggctgtgtaccctgccccacagggtcaccactgggaagaaggacaggacaagaaggtagacagaagcccgaagtagagtccagaaagccccagccatggtgaggcgtccccgcacaggcctgaggctgtccctgcagctagccaaggtcaaggtcgaggttttggcatcgccacacctcaactgtgtggttccacggccccacagagggttcggtgacgcctgggaaggtgccgggttccacggccccacagagggttcggtgacgcctgggaaggtgccgggatccacggccccacagagggttcggtgacgcctgggaaggtgccgggttccacggccccacagagggttcggtgacgcctgggaaggtgccgggatccacggccccacagagggttcggtgacgcctgggaaggtgccaggatggcactctgatggtctctaggctcagatctattcaggatgtgggagttcaccccagagagcctgtctgtccccatgggtcccacacacagggcctgtcacacacacaggccacaggcatctgcctgtcctggccccatctactcagtccctgccaggagccacaaggccccatgaaggtcaggccctggcactatgcctgggccaggagtggagcagagagctcaggtccctgcttcctgtagggaagactttccttggtaggatagaacctggagcagggactcttggggtgggaggtggcaatggtgccccgggaactgctgatgcggagtaagggtctgaagagccaccactaccagatctgaaacccccgcctagaaggaaggacatcagagacactgagagactcctggacttctgcccagagccctgctcgggctcagagaggggtggccccctgcgctgtggcccccaccactgtgggagcgttgagacgctgtgacagggaggcagttaacactgctaacctcaaagatgaactcagcagtcagcaccagggagatcggaggtcagcccacgccagccccaccacagacacccgcctgcatggctggatgtgcatataaggacagagacccgtgcggccaccgtcgccaccaggtcccttgcacccagtgagagccagtctggaatgggcgggacctggccccttcctcagccatggagtgcccttggcaagttctgtggcctctcagagtcccagtgtctcatctgcaccatcaacatgccacttggtcctggcctccggggctgctgcagcatccttttggtcagatattccacaaacatttcttaaccagagcagagctccaggcatggttcagccttcaaccagggcacaggcagggagggaaacgccccgggggaaggagagagcagtgttggagtaagtggggtgagggtgaagaccccagggcacctgggccagcaggagttggggagggtgcccaggaggctgaaacggccaagtgacctccaggctgaccatcccagtgtccagccacccccgctgaagccaccctgtgctctcctttgtggtccctcctcacctaggaagagcagaaaggacacagcacccacccgcgggacccctttcctgagcagaaagtgccctgtgccagcctggccaccgcctcactgtgaggatatgcacactctaggctgggccacctggctgtatgagccccagcccagcgagcggcacaatggggatgaccccagcacacctgccaggacccctgccccacagggcctgccactccctccacaggcctcatcttagggtctgyacctttgccccagatctgggttccagccccagggatttggcacacagccggtgcctaataacagcttgttggatggatagatgagcggatgggcgggtgagtgggtgaaggggcgctgcgaagacatctgtctcattgccttctcatgggaggataagataggaggaggagacggggcctcaggctggcagggccttaaaatcctgcagccccacggccagcaccaggcagtggggacggagccccaggtcactgaaggctcccttgttacttctgctggcttcatctggacaaacagaagccgctttccagctggcttcagcagttttcacttagattttcttctttttttttttttttttttgagacagagtctcactctgtcacccaggccagaatgcagtggcgtggtggcatgatcttggctcactgcaacctccgcctcctgggttcaagcgattctcctgccaggtagctgggattacaggcgtgcaccaccacatctggctaatttttgtatttttagtagagacagggtttcaccatgggggccaggctggtctcacactcccgacctcaggtgatctgcccgcctcagcctcccaaagtgctgggattacagacgggagtcaccatgcccagcctaggttttcttttcctttctgttttttattttcgttgctgttgttgttgtttgagatagtcttgctctgtggcccaagctggagtgcaatggtgggattctggctcactgcaacccccgcctcctgggttcaagcaattctcctgcctcagcctctcgagtagctgggactacaggcgcgggccaccacacccggctaattttttgtatttttagtagagatgggttttcaccatgttggccaggctggtcttgaactcctgacctctcaggtgatccacccgcctcggcctccccaagtgctgggattacaggtgtgagccaccgtgcctggcctaggttttcttttgcttgtgtaccaatgtttttggctggttggcgtcttgtttgtgctgaaatagcaagccagttttcctcactttggagctgcattgtctatcatgtgaagatgttcataaccaccagtgtctgcttctagc

SEQ ID NO: 95563 - DNA, 17036 bp, Homo sapiens
atttgtcagaggatgaggataggacatactttaacatacataacataacataatcggccgggcgtggtggctcacgcctgtaatcctagcactttgggaggccgaggcaggcagattgcctgagctcaggagctcaagaccagcctgggcaacaaggtgaaaccctgtcgctactaaaatacaaaaaaaaattagccaggcatggtggcatgcacctgtagtcccagctactcgggaggctgaggcagaattgcttgaacccaggaggcagaggttgcagtgagccgagatcactccagagtgagactccatctctaaaaaaaaaaaaatacaaatcatagcttcatacacattttaaaattttatccttttaaaggaatatttgtcagagtatgagggtaggacatactttaacagtctgttagtttaatttataacttgcaaatattgagacagatggcctatggtatccatctgtcctcttgccctgagctgacttgactcatgggtcccagcttgggttttccagttgtttgaatgggtaggaatctacccatgtttgccacagctagggggctggaggtggagggtccctctggaccccctttgaatgaccataacttcagagcctatcaaagagactaaatattctgcagcccagcaggaggtcccaacccagcctccagagggagtggaaacttctgcaaaccaacaggattaaactgaggctcatgtgacttccttgggagaccatcctctctcagatcttaagtttcagagatcaaatttccaagcatgtggtccttggctatggaaacctttcctcctgcccaggactctcactctacagagacgagttcattcaggtcatctgaagcccatgtagatttttggccacaaatggtttctcataaagtggtgcccccagcatgttcagcctcccctctgcccctgcaggccttctatcccagggtgccatgcactgctgccctgctgggaagagaagtctggaggggcacggggcagcactgcccacttagaagccccttgtcctatttttctgtcagatcctgcctccctgtttcagagggaagagtgggccgtcagtaacaagatgttttctcccttgcctcttttttgctacagttggtagaaatttctcccagacttcctcggtgactaatgatgttgggatgttgtggccttcacagggaggggacagggtgtcaggtcaccatatcacagatggttgaccccatgccgactacaactggctcttttggctgcaagtgacagaaacccaactcaaacttgttctgtgagtggggacatttattgaatctcagaattgaagggaggggaagggtgtgtttgggtcccagaaagggtggaccctggggctggaatcccgtccagactccgctccctcttcacggaggcttagcaccttagatgggctatgtcctctggccctgcacacatgggcttcctgttggaagctgagcagctccaccagcttccgtttacaaatatagtgactggcacacaagcattcctatgcttatggggggtggtggggggcaggaccccaggactggcagcccccactaaaaccccatgagggaaggagtcaccccaaaggtggtgctgttcccaaaaatgaaggaaacagccagtgctctccaccctatcccacccggccattttcctcacagatgtcacctgtcctcccaggcccagctgctacttctgcctgatgcttggccaatttgcctggttaaaaccagtgtatttccaggagatggatgacgtcacagaactggggttccagaagccttctttagaacatggagagctgttagttgggcagggctgaagtgtatgtggtgaggaagaagaggctcctactgtagacagccttgttctacagatcctcccagaaatctctgggccaggtggaacccagggtcagagagggatgggagagaggtaagctgtggaaggggtgggaacataccttctggagccactgtcttccttgaggggaccctgagagggggcttaatgggcagggatggagcttcctgcttcccgaggctcagtgacatctatctctgagggaccctcctgagtcagtgtggagtaggttgtttgkctgaaattctaatttaacagggcatcttgtaaattttatttgccaaatctgtcagctctgggggtagaatgatgggagaagcaaaagaatggcccgaagctcaggctggtgtggaacgagtctcagatagaacaagagacagaagcagcctcattgtctgaagtaaataccaaggttcgtggtctcacgtttaaggagatcgaggtcgcagacacacacgcacacagagtgagtttggagcaggagtttaataggcaaaaggaaagaacagctctctgtcacagacagaggtcccaggcaggttgccaggtggtagtaaaaacgtcagggttttataaatgggctagagaggggcattcatgaggaggggatgtcttatcctcctagagcccgatggttcagttgggaccaggtgtgctatctgtatagagcagagtttttaataggctctcaccccattcccgaccacatcaacttttagtctgtgtctctttgtcttgcttatctgggagcgagagtttctgtgtctattcccacacatcttgcagctgtaggcatacccatcgattctgcttttagcttccctatcttagcgcgcctaaagagaaaggaatgtagttattaaggcccactgttttactggggcccattgtataagtgtgaagtttggtgattacccaggagacttcccccacccttctgtgcctgagctcttatctgtttttaccctttgctctttcaggctggttgttgttagaagaaaagtgatttccttgaactgcgtgaggttagaaagggagctatctttgagctgctttgcgttaaaaggaaagttttctgctggggattcactttaccctaactgtctacctaagtagtttctttctgcctcctataacaagaccagagaagaaacaagcccaccagggtagccatcttgtccaagcagaagccgcctgacacttgaaggcggcgggtggaagaactcaggcttctgccccctcagcagcatatacctaagttaaggggaaaaacacaccttccctcagtgacagaaatagtcccaggttttcagatttattggaagtattatttctttttagtgtagagatgaggtcttgctgtttcccaggttggtctcaaactcctggcctaagcaattctctcacctcagcctcccaaagtgctcggattacaggcatgagccaccatgcctggccagtctttcagttttcatggcattggccattttgaagaatacaggccagttatcttacagattttcagtgagtttggctttgatgtttcctcaggattagacatagcctatgcatccctggacggaatattgcataagcgatgtgtcctccttgggaatcacatctggaggcacacaatgtccctctgtccgtctttggagatgttaattttgattgcaaggtcaaaatactgtctggttatccactgtatactgttttgttttttctttctgtgcaactaataagcaatctgtggggagaccctataagatcatgatatatccagttcttcagcattcttcccaccacctcagatttagcatgcaatgatgatttgttctcaaaccaatctatgatagttgcaaaatggtgattatttttcaactccatgacttcctccacacttatcggttggccttttattgtcaggaagaggtctctgcttcagctccacacaatgtatctttttgtcaatttattattattatgggctcatggattcctattgcatttaatgtataatctgttactgtcatttattctgatggtctaattgtcccagattgggttggaaaccattatgcaatggttccttagatatgacaccaaaagcacacccaacaaaaggacaaatagataacttgcacatcatcaaaattaaaaactttggggcttcaaagaacaccaccaagaaagtgaaaggcaacccacagaatgggaaaaaaatatctgccatatatctgatgctggtctagtatacagaatatataaagaactcttcccactcagtaataaaaagacaactcaatttgaaactggccaaaggttctgaatagacattttcccaaagatatacagtggccaataagcacataaaaagatgatcaacatccgtagccatctgggaaacgcaaattaaaacaacagggtgataccagttcatacccactaggataccttttgtcaagaagacagataataacaagtgttggtgaggatgtagagaaattggaaccttcatacactgctgatgggaatgcaaaatggtgcagccactttggaaatctggtaggcctcataagcttaagcctagggttaccccatgacccagcaactctactccaaagaaataaaaacatatatccacacaaaaactagtatgttaatgttcatagtaggattattcatgatagccaaaaatagaaacaacccaaatgtccatcaactaatgaatggatagacgaagtatggtctattcatacaatgaaatattattcaatcatagaaaggaatgaagtatcattacatgctccaacctgaatgaaacttgaaaacattatgctaagtgaaagaagccagatacaaaatgccatattttctgtaactccgtgtgtatgaaatgtccagaagaggcaaatccatagagacagaaagtagattagtggttgccaggggttgggaggtgggggatgggcagtgactgctaaatgggtgcagggttttgttttggattgatgaaaatattctaaaatcaagtgaggtagtagtcgtacaactctgcaaacatactgaaaaccactgaattgtacactttaactgaattaattgtatgatacatgaattatatctcaataatgctgttaccaaaaaacatcgtttcagatctggccagtcggtgcccctttgagctagctcttgtgtccatttgacatgccccaatacatatttcgagcactttttaaatttcttgtacagcaagataatccagacatctcataaccctttcctgctccagcctgggaatcagccatatttcctagagtcctggttcccttttgtgtggaatgtgaaccaagatctgggcattatttcatttaatcatcaaaacaacccttttaggtaggtattagcatatcttcattttacaaatgaggcccagaaaggttgagtatgttgcccaaagtcacatagcaccccaggatttgaaagcaggcagtgtgaatctagggcccttgctattcaacacacacacacgcgcacacacacatacacaatgtgaaagtgaaggttacgtctacagccagcccaccaagaattgtaccaggcagggtatgcccttgggaaaaatcatgtgtcatgtgtctgggggagtggggttgtggggagattagcacccagtgtcctggccctctttctaaaagcacatgctcagatacacacacacatatgctggtgaagatagtcttcagtaatctcctttgccaacctcactccccatcccaatacccaaatactacccatagctgggtgcccatataagaggacctatggatgaaatgagattggccaggtgtggtggctcacacctgtaatyccagcactttgggaggctgagatgggaggatcacttgaggccaggagttcaagaccagcctggtcaacagagtgagacccccatctctaaaaaataaaaaaataaaaaacaaacaacaacaaagaaagaytggccttggtttttraatgttgaagctcagaagtgggtatatggaggttcatgatactattctctttccttttttaaaggtttaattttccatgataaataaaaatctataaaataataaacaagagaaaagagattggaaacagccaggttggagcagtgagtgagtaaggaaacctggctgccctctccagattccccaggctctcagagaagatcagcagaaagtctgcaagaccctaagaaccatcagccctcagctgcacctcctcccctccaaggatgacaaaggcgctactcatctatttggtcagcagctttcttgccctaaatcaggccagcctcatcagtcgctgtgacttggcccaggtgctgcagctggaggacttggatgggtttgagggttactccctgagtgactgtgagtaccatccgcccctccccagccatttctcctctgctagtcatgtcctatatggccagcttctttctctcctgttcatctttcaaagccaagttcaaaaagcagcccccttcaaaamagcctttcccaacacgctgtattcactcaagttattgtctgagcacttattatgtaccaacaactgttttagacactggggctgtagagataaacaaattcccttcccttataatgttcacatcctaggggaagagagcagcaacaaacacactcataacgtactgcctggtggtgaccaatgctatgaagaagaataaagcagggggagcaatggtgaattctttagatggggaagtcagggaaggcctctctgaggagatgacattaagcagcactgaattaaatgaaggacctggtcacccaaatgtctgggggaagaacactctaggcagaggggacagctagtacaaaggctttctcctcctgcatggaagggatatctcccttttgcccaggagttgtgtgcacctgtcttgcaacacttttgtcctttaatcttgctttgtgggttttttaggtaccttttttttttttttttagacagagtctcgctctgtcacccaggctggagtgtagtggcgcgatcttggctcactgcaagctctgcctcctgggttcacaccattctcctgcctcagcctccccagtagctggaactacaggcacccaccaccatgcccagctaatttttgtatttttagtagagacagggtttcaccgtgttagccaggatggtctcgatctcctgacctcgtgatccgcccgcctcagcctcccaaagtgctgggattacaggcatragccaccgcgcccggcatacatatttttaagcttgtacatatttttaagcttgtacatacaagcttattacaaggcctgtattacaagcttaggtacatatttttaagcttgtaatacaggccccttgaaggcagcatctgtgtttgacccaactgaaatgtccctcactaggctttgcacagttcctggcacacagtaggtgctcagtaagtgcaaaacacatgaatagatggacagatgagtaattgtacttatgagtgggtggatggaccacaggataagagggcaagtcaatggagatttcaagccctctagtcctatcttgcctcccaggccttgttccttttgtctgaaaccttgcctccctttctcctccatctcccttctcactcagcttggtcccctctaaatcctgaccttcttctccctactctaagggctgtgcctggcttttgtggaaagcaagttcaacatatcaaagataaatgaaaatgcrgayggaagctttgactatggcctcttccagatcaacagccactactggtgcaacgattataagagttactcggaaaacctttgccacgtagactgtcaaggtctggccagggccccagggtgggagagatgagagcagcaaccrggctctgctcacagaacttctcttcccacccacagcctgggaatggccccagaaatatggttcaaaaaatcagggaatccctttactgagcagagggctggagtagtgtccctaatgcccatccagttaggagattctatagagtccctgagtaggatccaggaaggctccrtatacagctggtagtagtagaacagttgcagcagccaatgtttattgagagaatattatacactaagtgctttacatacttggcttatttcatccaactttcatgcagtagaaaccatttatgatccctactttacaaaacagcaaactgaggctcaaaaagagaaccagcattgaatgccagactaatggcctcacaggctcttaaccattccggagtaccctctttagctaatgatctgaccaaagaccaagtgcaaactccctacctcagagctgatccaggaggctcgacagggcccatgactctgcccctcacctctgccttcgcacactgaccgatgtccctcggctcctcgcctgaagacccccgctcactaggcgggacatacctctgtggtgttttggcatttcctctccctrgaaacctcccacaaactttgagtgaaccactatctaccctggttaggaagaatagtagtgaacaggcccaaatctcaggcctcttgccccttctgcccacaccccctttcacctcgaacctctagcagccattgtagggatgtctaaatgggccccctgggagacagcctttgcctcaactggaagcctctaggtggcatagggctgtccagggagggctggtgtctgcctccatctttgggrctgtcttctgtgccctcacaggttttctcttcctccctttcagatctgctgaatcccaaccttcttgcaggcatccactgcgcaaaaagkattgtgtccggagcacgggggatgaacaactggtgaggaggacacggtgggactcagcgggcagagccccacgaaggaggacgtgacagagaaaagggcagtaggcaaggactcacgggcacgcccttgcagtgtctagaaagatgtgggatagcggacgggcttggaactctgagatctggttcttctatgatattgtattaaacaaaactcttctggttgcagtaacagaaaacaacttgagctagctgggggaaatttattctgagaggcccagatgtctcactgagcccactcaagggctgcagctgggcctcaggaagagcatggaaccagggctggaaattgtcagcacactgtscatggcaggtttcagcttctcttggtgcatttgcttcacttctctctccrcagactttctctgctccacagtctaaaggacaaagggtgctgcaaagttaataagctaaagtcctaagcaaccatagggactggctaggctcagtcccagtccaagttcctgggatagagaatctgattggttccacttggaccatgtgtgcccccttggtccaatcaactgtagggatgggaggagttaagcaatacaattatggctgccgctcgggccctgtggccataattgacaatatttttttatttaaaaatgtggaccgggcatggtggctcacgcctgtaatcccagcaccttgggaggctgaggcaggtggatcacttgaggtcaggagttcgagaccagcctggtcaacatggtgaagccccgtctctgttaaaaatacaaaaaattagctggtcatggtggcgcctgcctgtagtcccagctactcaggaggctgaggcagaagaatcgcttgaacctgggaggtggaggctgcagtgagcsgagatcgcgccactgcactccagcctgggcggcagaatgagactctgtttaaaaaaaaaaaaaaatgtggcggctgggcgcagtggctcactcctgtaatcccagccctttgggaggctgaggtgggtgggtcacaaagtcaggagttcgagaccagcctggccaatatggtgaaactttgtctctactaaaaaatacaaaaattagccaggcgttgtggtgggtgcctgtcccaggctgctttttgtgttatgtggggatgaggcactgaccctgtgggccgggatctctctggggacctttcccttgctttctgtccatgctccttaaggcaagctgcatgggaggctgaggcaggagaatcgcttgaacccgggagccagaggttgcagtgagctgagatcgcgccactgcactccagcctgggtgacagagaaagaatccgtctcaaaaaaagaaacaaaaaacgacaacaaaaaaatgtggcattcatcagctgggcagacacccacatagctgtgagctcaccaacrgtggacattcagatagtcaccttttctgagcttcaaactagatatataagtaacacaaatggctgcctctacaggcaactgtggaaggagtcaaatcccttgcatactcaaaacaccacagaaaagaattgacagcgatgattatgctgatcctttctggagggagaatcaatggttgtacctgggactttttttttttttttaataagtaactctcagccctgtaaaacagtgctcaccccttcagggagatatgaggattttaaaatgtggaaacgttgatccagggaagcaggcaaacaccagagatgagagagttttacaggattcgtcagaggggacagtggaggacagaccagagggctagctagcaatgacggggattctgggcgttgctccatatgcgagactcaccaagaactgggtcatgtgtgtggaagagttactgagtgtgaggcaagaaccatgtcttttttctccgcagggtagaatggaggttgcactgttcaggcsggccactctyctactggctgacaggatgccgcctgagatgaaacagggtgcgggtgcaccgtggagtcattccaagactcctgtcctcactcarggattcttcatttcttcttcctactgcctccacttcatgttattttcttcccttcccatttacaactaaaactgaccagagccccaggaataaatggttttcttggcttcctccttactcccatctggacccagtcccctggttcctgtctgttatttgtaaactgaggaccacaataaagaaatctttatatttatcgaaatattaaagcactcgctctgcaaagactgtgtccatttattcattagtctacatatatttgagtacctaagacagtgggagtgtactaggtagtagaaggaagacaaaacacagctattgttgtttaggtgttcataatctaggtggagaagcagagacatccacaaacattacaataggtaattaaatgtatagtaaaatccataattattgctttgaaacagtatcagcatccaagtaattcctccaaagaacaatttttgaagtaaaagagaaaactcagaagtaggcaatgggtggggtctggtattgatgtggagaaagtagtgatgggatggagaaatagtggcagataccaataatttgggggtgctttgggagaataagctaggatctagatgattaaaaaaaggtgctctggacaggatctggtttgcctggagggtgctgaggtggagtagaacatgcttaaagaaaaggcaaaatcagaaaagtgacagttgaaggaatgtcctacacatagccaccgtcagtagtgtctgaccaatctggggttttatcttggaccacttatttctctaccactgagccttagctgtttctactatagaaggagggatttgactattcagtagttgccagacttttgtatttcacaggtgataaaatgtaaaaaataattaaacctgagatttctttcttttttttttttttttgagacagagtctcactgcgtagcccaggctggaatgcaatggcaggatcttggctcactgcaacctccaactcccaagctcaagcaattctcctacctcagcttctcaagtaggtgggactacaagtgtgtgctactacacccagctaatcttttttttttttttttttgaaatggagtctcactctgtcacccaggctggagtgcagtggcatgatctccactcactgcaacctccgcctcctgggttcaagcaattatcctgcctcagcctccccagtagctgggattacaggcgccccccgaccacacccggctaatttttgtatttttagtagagacggggtttcacggtgttggctaggctggtctcgaactcttgacctcaggtgatccacccacctcagcctcccaaagtgctggaattacaggcatgagccaccgtgcccagctattttgtatttttagtagagacagggttttaccacgttggccagcctggtctcaaactcctgacctcaagtaatccatctgcctcggcctcccaagtgctgggattatggatgtcaggcaccaggcccggccgaggtttctaatttttaattttaatgtccaagtaagagcattaaagcaactatcctctattagcatcttttcatagaaaaatttttagtatcaacattatagggaggtcatacttgtagaagaatggagtggaatctactttattttatgaaattataaaaaacctgattatattttccatatggtcctcattttgtagagtaggggtgaaaactttatcacagcatgagtctgaggatcattattcagaaatcacaagagacttgtcctgtagggtctcttctggctctgacattctaggattaaaataaacagtagtaggactcactttacttcttgtgttactgaaactgcctttataaaaattatgacaaatctgacctaactgattccattttgcttctaacctccaagctgcccttgctcattcctgggcacaggccaagctaactatgagaggaatttttgctgcttaactttgaaacaaagataatagtcccttcctgaaacaaaccacctccctgcttgggaatcagatctcctctgtaaaactaacaaattagccacaagattagaaattatggctcagaaattatgtagacagaggccacaagattcctaacctctccagttgctcctatacaaaacactgttgtagtctcagcaatgcaccaagatataacactctgtagttgtctgatataacccccggagttctttgtcctacctccaagatgattaaggagcgtggacacaaaggtggggttacagcaaaagtttaataagcgaaagaagaaagctctctgccagcagagcgtgggggccagaacgggtgtcccctgtgaggctggggtctttatggactgggaaggggaagcaatgtgcttagtccgacagctgtcttggagaactcagcttggcaaggagccttggcccaggaccaatcaggagctgaaatgattcttagatgctgcttagcttggcccaagacctatcaggggctgaagtgatgattcatagaggctggacttacaggtccaaaaaggaaagtagagtgcccactggaactcaccggagcccactatgcccatgcccacaaaagtagaagcaacttcatcctgggagcccactgactatacaaaggacaaaggcatttctatgccaggccttgttcttttgtctgagtgagctgaagttttgtgcaagcttttatccaaatgggccagaggtttttccatctgtgcagccgtgggcatgtctccaggcacaacaccctatgctagttctcttatgggtgctggtagcttgaattttttcccaggctgctttttatgttatgtgggggtaaggcactgaccctgtgagccgggatctctccggggacccttcccttgctttgtgtccaagctaactaactgctttcaacattactattgtaaaacctaatattggggttctaggtatttttcagacccttcattctgatggaccagctggcaccactcacatgggcaaactggctcatctggtcttgcggcccccaaccaggaattcactcagcacaagaacacaagctctgactctctatgatttcatccttgacccaaccagtcagcatttcctattccctggccccctgactgccaaattaccctttaaaaaacaccagcttccaaattttcagggaggctaagttgagtaatagtaaaactccagtcttctatttagctggttctgtgcttatgaaactctttgcctatttcaataacactgtctcagtaaatcagcttttctgggcagtgggtatgatgaacccaccagttgattacactcctccaccacgtagctgattatgacacctacccttctcagacaccatcagctccaatgttggtgccttatttggacttattctttgtgggtttgtttgtttgtttgtttgtttttcttttttcaaaattaatctctccttctcactcgtacctccaacctctcacatcatctgacccccacaagtacacatacacgattcaccagaatgacgtaggacaatcagggaattctttttaaggatttcatgcgagactgttaatggtttagtgagttatacttttatttgcaattttaaactcttaaaaaaacctcttaagtcaaaagattgcatctttcgtggttatttcccacaagtgctaatacttagtaccctaatctccttcaggagtgaagatgaagctggcttctataaacacgtccctacccttccatcctgtcagcctattttgggactttaccctaaacatgcattgaacggaagctctaaactcagggatcttgtggctgtgactggaggaggggaacagactcagaggctggccctaggtaggaggggcaagggagcgatccgagccccgtccccgcccctcgcatgcgcctctttttaaaaaagcgcgggcgtgccttgcgcaggcgcaatgctggggcgagggttagccgcgcaggtgcggtgaagggaggatggcggagttggtaccttttgcggttcccatcgagagtgacaaaaccttgctagtgtgggagctgagctccggacccacggccgaggctttgcatgtgagccggggccaggatggagggagggatggagaaagctgcccacccgctgactgggagttccggagtcctgcctcagaccctcacctgcctgagcctccgctgaaggactcttaattataaaggggatcccaactgacaactgacgacccccaacagatttttagagtcccggagaggtatctctccaccttcagaacgttttaccttccagtgcttcttaaagtttaggattttaagaggaaaacctgttgattaagtgggaagtgttttgaatcgcatccttcgcgaagagaggtttggggaatatgagggcatgtgcggttttgttttctgggcgtgagatttcatgcatttacttgtcccacccccacagcattctctgttcacagcattttctcagtttggccttctgtattcagtccgggtcttcccaaatgctgcagtggcccatcctggtttctatgccgtcattaagttttattctgcaagggctgcccacagagcccaaaaggcatgcgaccggaagcagctttttcagaaatctccagtcaaggtgggtccaaatatggaattcctagctccgctgaaatgaagtgctgaattcaataataggttagcatttgtccagcacgctggtttacagaatattttcagatgcattgccacactaatcttccagttctctgggttttttacatgaagaaactcaaactcaaggtggttgagcgacttgtttaaggttcctgacaagaattatggaaactcgagattgaactaaaacctactgatgctaaacctcatgtcattttatgctgtccctttttaagaaatctcagcttgggcaacaaaatgagaccccatctctataaaaaaaattgtaaagataaggctgggcaccgtggctcatgcctgtaatcccagcactttgggagatcgaggcgggctgatcacttgaggccagcagtttgagaccagcctgggcaacatagcaaaactccatctgtactataaatacaaaaactagccgggcatggtggcatgcgcctgtagtcccagctactcgggaggctgaagcatgggaattacttgaacccaggaggtggaggctgcagtgacccgagattgtgccactgcactctagcctgggtgacagagtgagactccatctcaaaaaaagaaagaaagaaaaataaaaaattaaatatcagccagatgtggcatgcacctgtagtcccagctacttgggagactgaggtgggaggatcgcttgagcccaggagtttgaggatgcagtgagcaataattgcatcactgcactcctgcctgggccacagagtgaaaccctatctctaaaaaatgactgaatgaatgaaatctttgccagaagacttctgcttatatttactttttaatttttttagagacagagtatccctgtgttgcccaggctggtctctaaatcctggcctcaagcagtcctcctgcctcagcctcttaagtagctaggtacaggccaccatgcccagctatatttactttttatttttattttttgagatggagtctcattttgtcacccaggctggagagcagtggcatgatcttggctcactgcaacctctgccttccgggttcaagtgattctcctgcctcaacctcctgagtagctgggactacaggcgcctgccaccacacctggctaatttttgtattttagtagagatggggtttcaccatgttggccagtctggtctcgaattcctgacctcaagtgatccacccacctcagcctcccaaagtgctgggactacaggtgtgagccactgtgcccagccatatattatatatttactttttttttttttaaagacagagtttcgctcttgttgcccaggctggagtgcaatggtgtgatctcagctcaccacaacctccgcctcccgggttcaagcgattcccctgcctcagcctcccaagtagcagggattacaggcatgcaccaccacgcctggctgattttgtatttttggtagagatggtgtttctccatgttggtcaggctggtctcgaactcctgaactcaggtgatctacccgcctcagcctccca

SEQ ID NO: 95564 - DNA, 49240 bp, Homo sapiens
acgattttagcatgtgttttttcttctactaaataaatatgcaagcctgggcaacatagggagaccccgtctctaccaaaaaaaaaaaaaaattttttttaagtagctgggcgtggtggcgtgagcctgtagtcccagctactcctgaggctgaggtgggaggatcacttgatcccaggagttcaaggctgcagtgagtcgtgatcatgccactgcactccagcctgtctcaaaacaaaacaaaaaacaaaaaaacttaaaaatagcatcggggtttcagactctcctaagttcacccccaatacacctgcgctttgtgagactccggctaagaaggaacctggtttccaaagcgggcgtggaaagaagagtgttcggggaataagagcatctggattggaattcagcctcctgcatttattcccacgtgagcctagccagtctcagtttcccctgaaatcacaggaagtacccacctcacagatggcggattctagatcacaaggctaagaccttgggccgaagcctcgagaaatattgttattcctctacccaggagtaggggcgaggaaggcacctaaacgtgggaggaaagggtctggcttctaccctcgcagatactcacgtcgcccacaggcagggtgatgggaaaccgccgcagggcgcgatcttggacgcgcccggcagccccagccatcgcggctgagcatggcagttacactccaacaaccgctgctcttggcactggccaagccggagcctcattggctgaggcctggaaatcctgtcagccaatcagctgaggggacggtacagcgctcgggcacgcgccccaggaactctgggggccaaagacaagcgcaagcctcccgcagagggctttgtttcctgctaaatgtctggcttcctggtgagactgggaactccatgagggcagggcaagatctttaatcttgatcctcagtgactaacacatagtggtcactcatttggtgaatcatgagccattagcatctccccccgtgggtcaaactttttaaaaattttgcatctgaacaaataggtgcagacgcacatcctctaatctagacccttggtattccaagtataatctctcagcagcatagatatcgcctgaagcctgttaaaaatgcaggctctcggccgggcacggtggctcacgcctgtaatcccagcactttgggaggccgaggcgggtggatcacgaggtcaggagatcgaggccattctggctaacactgtgaaaccccgtctctactaaaaatacaaaaaattagctgggcgtggtagcgggcgcctgtagtcccagctactcgcaaggctgaggcaggagaatggcgtgaacccgggaggcggagcttgcagtgtgcagagatcgcgccactgcactccagcctgggcgacagagtgagactccgtctcaaaaaaaaaaaaaaaaaaaaaaaaaaattcaggctctcaggccctaccccagacctattcaatttagcaatattttaagatcctaggtgattcctttagcgttttatggtctgaaaagtacattagacaaaaaaattataatatgctcaattgaaatattcctttagaggttcttaaaaattcagccttggccgggcgcggtggctcacgcctgtaatcccagcactttgggaggccgaggcgggtggatcatgaggtcaggagatcgagaccatcctggctaacaaggtgaaaccccgtctctactaaaaatacaaaaaattagccgggcacggtggcgggcgcctgtagtcccagctactcgggaggctgaggcaggagaatggcgtgaacccaggaagcggagcttgcagtgagccgagattgcgccactgcagtccgcagtccggcctgggcgacagagcgagactccgtctcaaaaaaaaaaaaaaaaaaaaaaaaattcagccatccccatttgacttagtaccaaataagccagcattgtaaacccattttatagatgctaaaagtagctaagatgccatgggagagttaagagtctagcgctacatccttccaaagctatgttagtttttttttttttccacttgtttccatttctttcttttttttttcaattgagacactgtctcattctgccacccaggctggagtgcagtggcacgatcatggcttactgcatcctttacttccctgtctcaagctatcctcccacctcagcctcctgaatagctgggactacagatgcatgccaccatgcccagctaatttttgtatttttttgtagaggttgagttttgtcatgttgctcaggctagtctcaaactcctgggctcaagccatccacccacctcagaatcccaaagtatggtgattaaaggtatacgccatcacgccggcctgtttctgtttgttgtttttattattttttaaatttaatttaatttaatttttttgagacagagtttccctcttgtctcccaggctggagtgcagtggcacaatcttgagtcactgcagcctctgcctcagccttctgagtagctgggattacaggtggccgccaccacacccagataattttagtatttttagtagagatggggtttcaccaggttgaccaggctgattttgaactcccaacctcaggtgatctgcccgcctcggcctcccaaagtgttgggattacaggcatgagccactgtgcctggcctgttgtttcactctgcggcccaggctggagggtagtggggcaatcacagctgttgtactatttcagttctttggttatctttctcatgccccaagatggagttcaacaaatgttctactggagagcaagccatgtgcatatcgctcactcccacctacaggcctatttgcttagcctagagtaaatcaagaacttgccagtagtttcctaaaatacataatttgcacattgcattaagatagcattctttctagcatgtagttgacatctacaagagaaaaatatcacagaaaaatatcattagataattatattagaatgagacttttgggcctcaattacaatttctttcttttttttgttttaagagacaagggggccggacgcgatggctcacgcctgaaatcccaacactttgggaggccaaggcaggcgaatcacctgaggtcgggagttcaagaccagcctggccaacatggcgaaaccctcatctctactagaaatagaagaaaaaaaaataactgggcgtggtggtggcgcctgtaatctcagctactcgggaggctgagccaggaggcagatgttgacatgagccgagatcatgccattgcactccagcctgggcaacaagagtgaaactctgcctcaaaaaaaggaaaaaaaaagagagagagacaagggtcttgctttgttgcccaggctggagtgcagtcgcgagatctcagctcactgaagccttcagcttctgggctccaagtgattctccttcctcagcctcttgagcagctgggactacaggcgaatgccaccacgcctagctaattaaaaagaattttttttttttaacagagtctcactatgttgcctaggctggtttcaaacacttgggctccattgatcctcctgccttggcctcccaaagtgttgggattacaggtgtgagtctctgtgctggcctacaatctctcttaatgggtgaataaaaaattcttatttatttatttatttattttgagacaaagtctcgctctgcggcccaggctggagtgcagtggcctgatctcggctcactgctagctccgcctcccgggttcacgccattctcctgcctcagcctccagagtagctgggactacaggcgcccgccaccacgcccggctactttttttgtattttttagtagagacggggtttcgtcgtgttagccaggatggtctcaatctcctgacctcatgatctgcctgcctaggcctcccaaaagtgctgggattacaggcatgagtcaccacgctaggccaaaaaattattttaatctgtttataattattttattaatgaaggtactatcctagtaacaactctggcagcagaactaaattattgagattacaacctgtattattttattctgaaagtacaattcatacataccttttggctttctattttaagtgtggtggcttagaagtctgactcatttcccagattgtttaagctaaatatatgttatttagggcactgtggatcagaataaacacttgtgtctcctggttttgccctcagctgtgttacttaacctctctctctgccttattttactctgttaaaagcagatagtagtagtaactcatgataaggttgtgaggattaaaagcttagattggtgcctgctgtatactaagtgctcaataaatggtaggtttgatgattactatttgtgagcagctatgaagtgggaaagtaaatcaaatgatttatgtttttactggcttttgggcttgaccttctttttgtgtaggatgctctttttgcataaaaagtagtatttttctgtattgtctgtaacttgagttatgaccagcagcacaatttattacccgtgtatttggatatatcagatgatggaggtaatagtgcagtggttaagagcatgggctttggagttaaatagacacaggtttggatcctgtctccacaacttactattgggtgtgaacttgtgcaaggtaatttcctcatttgtaaaaaggggactccagctgacctcatacacagtttaaaaatcaaatgaaataagcatgtgaaatgtttgatgcaatgcctcacgtataaatacatacatatttttcagacagggcctcgctctgtcgcccaaggaatgcagtgtcacgatcagggctcactgcagcctcaacttcctaggctcaagtgatcctcccacttcaacctcccaagtagctgggactacaagcatgcgccactatgcctggctaatttttattttttatttttttttttgagacggagtcttgctccgtagccaggctggagtgcagtggcgccatctcggctcaccgcaacttccgcctcccgaggtcaagggattcccttgcctcagcctcccgagtggctgggactacagatgcgcgcccggctaattttgtgtttttagtagagacggggtttcaccatgttggccaggatgctctcggtctcctgacctcgtcatccgttggcctcagcctcccaaagtgctaggattacaggtgtgggccaccgcgcccggccttttaaaaaatttttcgtagagacagggtctagttatgttgaccaggctggtctccaactcctgggttcaggtgatcttcccaccttggcctcccaaagtgttgcaattataggcgtgagccaccgcacctggcatgtatatatgtatatgtatatatatatattcaccctcctcccccaggcctataaatattaacttttttttttccaaaggcaaatcgaggaccagatgctgatccaatcgtacctgaactactgatgttatttcttccacaccaaattcaaggtctcccccggacaagtgtaaccatgggcacaatgtcagactctttgagggctgtgtatcactcagcaactaaaataaacaactatagcaagatatgtaacctctaccaaacacgttaccgtctcccctttttaactatgtcaattgtggtgttaggactttgcctatggaaaccaaaatgtcgacctccgggagccgggggcgggggggggcggggggggcgggggggggtctaactcgatcatgtgacgcaccccatcccaccttttctcgcagttgcatcagccaagttagagccgccttcccaggaatccactaatgaacggattcgtcctcagtttgactggcatgttggttgaccaataatatctcatgaggtaaggcgcggcggggcactttccgtcggcgcgctctgattggacggagcgtggcgggttgtggtaggtcgtggtctgaggccggtacagctgcgcgtctgcgggaataggtgcagcgggcccttggcgggggactctgagggaggagctggggacggcgaccctaggagaggtaggccgccctcggagagctctgcggtgctaggagagcggctgggcccgcagactggggggaaagctccgcagccgcagtgggccccaggatcaggccccgcgtggcctggagaagcccagtctgggctggagcgggagctggacagtgtggccttgcgttcgcccccgggagcgctgcgagtgtcgcggcctcggrtggatttgctgagcaccaatacctcacggttgccaacctggggttttagctcccttggttttaatcccctaggggcgggtgggggcacgggaggaaggatgggccagctgggtgcaatcctgctgtaagccagccattccttgatttcttaaaattaactaaacagctgatgccggtccaggcgcaccgagaccgtcatcttaagctgttctgtaaaacagtttgtatttctcggtgtgctttgaagcatgtgagttaattccgaacttggtgttaaaggattagtatacctgatcacgaaatacgtatttagcagccactgtactagatgctgaggatgtgctgtaatagcccagggccaggcgcggaggctcacgcctgtaatcccagcgctttgggaggtcgaggcgggcggatcacctgaggtcaggggttcgagactagcctggccaacatggtgaaaccccgtctttactaaaaatacaaaaattagccgagcgtggcggcgcgcgcctgtactctcagccactccggaggctgaggcatgagaatcgcttgaacccggcaggcggaggttgcagtgagctgagatcacaccattgcactccagcctgggtgacagagggagactccgtttcaaaaaaaaaaaaaaaaaaagagcccagaacagtcgttgctgctgggatggaactgacagcctgatgggggaggcgcacattaaacaatccatgaagcgcgtatggaaattatgaagggaaacacttgaggctgtgagacagtaaaagagggggagccttatcaagaaggggaaggcggccgggcgcggtggctcacgcctgtaatcccagcacttggggaggccgaggtgggcagatcacgaggtcaggagattgagaccatcctggctaacacggtgaaaccccatctctaccaaatatacaaaaatagccgggcgtggtgactggcgcccgtagtcccagtagtcccagctactcgggaggctgaggcaggagaatggcgtgaacccgggaggcggagcttgcagtgagctgagatcgcgccactgcactccagcctgcgcaacagagcgagactccgtctcaaaaaaaaaaaaaaaaaaaaaagaagaaggggaaggctgtcttaaataagtgtcttggccgggcgcggtagctcacccctgtaatcccagcactttgggaggccgaggcgggcagatcgcctgaggtcaggaggtcgagaccagcctgaccaacatggagaaaccccgtctctactaaaaatacaaaattagctaggtgtggtggcacatgcctgtattcccagctactcaggaggctgaggcaggagaatcgcttgaagccgggaggtggagattgcggtgagccgaggttgcgcaccattgcactccagcctgggctacaagagcgaaacaccgtctcaaaaaaaagaaaaagtgtctttacgtttgttgttgtttgagtcagggtctcaccctgttacctaggctggaatgttttggtgtgaccatagctcactgcagcctcaaacttatgtgctcaagcgaccctttggactcagcctcccgagtagctgggtctgcaggtgcacaccaccacacctggccaattaaaaaaaaaattgacctcccaggctcaggtgttcccatgttgcccaggctggtcttgaattcctggcctcaagcaatcctcctgtttcagcctcccaaagtgacagagcgagacctgtgtgtaaagcctgggtgacagagcgagacctgcctcaaaaaaaaagttgaaacaggtctcgctttgtcacccaggctggagtgcaatggcatgatctcggctcgctgcagccaccgcctcccaggttcaagcaattctcctgactcagcctcccaagtagctgggattacaggcgcccgctaccatgcccagctaatttttttttttttttttttttttttgagacggagtctcgctctgtcgcccaggctggagtgcagtggcgcgatctcggctcactgcaagctccgcctcccgggttcacgccattctcctgcctcagcctcccgagtagctagctgggactacaggcgcccgctaccacgcccggctaattttttgtatttttagtagagacggggtttcaccgtgttagccaggatggtctcgatctcctgacctcgtgatccgcccgcctcggcctcccaaagtgctgggattacaggcgtgarccaccgcgcccggcctaatttttgtatttttagtagagatggggtttcaccatgttggccaggctgttctcgaactcctgacctcaggtgatccacccgcctcggccccccaaagtgctgggattacaggcgtgagccactgtacccggctgaaaattttctgttgcccaggctggagtgcagttgatcttggctcattgcaacctctgcctcccaggttcaagcgattctcctgcctcagcctcccaagtagctgggattataggtgcgtgccaccacaccccgctaattttttgttgtgttgtatttttagtagagacagggtttcaccgtgttagccaggatggtcttgatctcctgaccttgtgatccacccgcctcgacctcccaaagtactgggattataggcgtgagccaccctacccggcctcaaaaattttttttaaatacaaaaaaattagtcgggtttggtggcacatgcctgtagtcctagctactccggaggctgaggtgggaggaacacctgagcctggaaggccaagtgattgcaccattgcctgcgctccagcctgggtgacagagagggagaccctgtctcaaaaaaaaaaaaaaaaaaaaaaaattcctgtggagtggctggagccacagcgtgatttaaggcacccaagacctttacagctcctgttagtaagtgaaacctgaggttctgcctttgtgctacctctgtatcccatatagccctccagtgaataaatcaatgagtttatgttgaataaatatattgaatttatatcgaataaatataaatttagattgaataaataaatgggggtaaacaaatgaatgtggggatacagcttttaatagtttcagccttcatagactcatagttaatatattcagtccttttacacaatactgcagttaattctgcatatgatagtctcctcaggaaggacataggctgtcattcattttgattcttggcacatagtatgcattcattatggtgaattagtaagcaaaaatgggaaattcatgtgtcttttggaaagtagctggagtcaggatctcctgttcactttgtacatctctattgtattttcctcataaggagaaaactttggctgggcatggtggctcatgccatcccaacaccttgggagattgaggccaggagttcgagaccagcgtgggcagcatggcaatactccatttataacaaaaacagaaattagctgggcgcggtggctcatgcctgtaatcctagcactttgggaggctgaggctggcagatcacctgaggtcaggagttcgagaccaggctgaggaacatggtgaaaccctgtctctattaaaaatacaaacattagctgggtgtggtggcacttacctgtaatccaggttacccaggaggctgaggcaggagaattgcaggaacttgggaggtggaagctgcagtgagctgagattgcgccacagcgctccagcctgggcgacagagtgagactctgtctcaaaaaagaaaaaaaaagaaattaactgggcatgctggtgtgcaactgtagtcccagttacttgggaggctgaggcaggaggattacttgagcctcggagtttaaggctgcttaagtgattgtcccactgcactccagtctggacagaaccagaaaaaaagaagaaaactttcagctaaacaacttaaaagtaatattatccattctgttccttcaaggttttcctttttttttttttttagacggagtctccctcagccacccaggctggagtgcagtggcgcaatttcggcttactgcaaccactatttcccaggttcaagcgattctcccrtctcagccttctgagtagctgggattacaggcactcgccatcattcccggctaatttttgtattttagtagagatggggtttcaccatattggccaggctggtcttcaactcctgacctcaggtgatccacccaccttggcctcccaaagtgctgggattacaggtgtgagccaccgcacgtggcgtaacgttttccattttatagattgcttccaaatacagtatagcttttgatcctcamaacacctcagttgagtaggcagggtagatactgcttttttacagaaaaggaactgaactcaggcaaaagtgaattaaggttacggttgggtctggaattccagagactttttgataataatgataatattgtgaataagatggttctcatttttctagacacagcagtttgtggcactacagcaccatgccagtgatcagcactctcaccaaagcctgtcacttctccccagcctacctctcagggaaatcgtaatatctgtgaaagagctgtttttgtttttgtttgtttgttgacacaaggtctctgtcgcccaggctggagtgcagtggcatgatcttggctcactgcaagctccgcctcctgggttcacgccattctcctgcctcagctttccgagtaactgggactacaggcgcctgccaccatgcccggattattttttgtatttttagtagagacggggtttcaccatgttagccaagatagtcttgatctcctgacctcgtgatccgcctgcctcggcctctcaaagtgctgggattacaggcgtgagccaccgcgcccggccatttttgttttttttgagacggagtcttgctctgtcacccaggctggagtgcagtggcgcgatctcggctgactgcaacctccacctcctgggttcgtgccattctcctgcctcagccttgtgagtagctgggactacaggcgcctgccaccacgcccggctaattttttgtattttttttctagtagagacagagtttcaccatgttagccaggatgttctggatctcctgacctcgtgatccacccacctggctaatttttttactatttgtactgacaagatcttgctatgttgcccagggtggtctcaaactccagggctcaagcaattctgccacctcggtctcccaaagtgctgggattacaggcgtgagccaccgcgcccaacttgtgaaagagctttgaagtcataaagttttttctctctccaccagttcccttgtactttcactttcagtaagctgtgcctccaaagtggggctacagcatccccactccctggtaatctaatggctggaaggcagccgtttgctgttagggttcttgggggatgtaggctacatagaggtaggtacattcctgctacatacaggtggtcccttgtacagataggcccatccccaggactattgctgctgacagccgcctcaccatgacatcaggccaaacctagagaccctgactttggggctagtggaactttgcagttctaggcgtgtacattaacacagagctgaagggatctttagagataatctcatatggacccctcctttttttggtgaagtgactccctcaggacttgaagctagaactcaaaccccggtctcctgagcctctctccctcttccccagttggactaaactgagggtttttctccccctttttttctttttttttttccttctttttttgtttttttgagacggagtctctctctgtcgccaggctggagtgcagtggtgtggtcttggctcactgcaacctccacctcctgggttcaagcgattctcctgcctcagtctcgcaagtagctgggattacaggcacgcaccaccatgcccagttactttttgtatttttagtagagatgggatttcaccatgttggccaggctggtcttgaactcctgaccttgtgatctgcccaccttgccctcccaaagtgttgggattacaggcgtgagccatcgtgcctggctgtccctctttttttctaattcctagtctcgggcctgacacagagcagatgctcratacatatttgtttaatgaacaaacatccagcagcagtgtgcttggtgtgctggggtgttgaacctcttgaggttggcatgggaaggaagaacagatggggctgctgtctgctggtgatgatgattttagccttggacattacaacatagaggttttaggatcaaacagctcacctgagtcgtgctttgacttggcttgagaagccagaagtcttgtgtaatgtgtactttgactttcaattcccttaattttccttcatttttttttctttgattagttctttggggtgactttcaagatggactctactctaacagcaagtgaaatccggcagcgatttatagatttcttcaagaggaacgagcatacgtatgttcactcgtctgccaccatcccattggatgaccccactttgctctttgccaatgcaggcatgaaccaggtaagggtttttccttttttcttggcttttggttcacataagaggcagcagagcccagataaaagcacagccctggggtcagaccgattctggttctgtcactccctgtgtgatcttgtgaaactttatgtgatgggcctcagtttctttgcaaaatgaggaataatattgcgggcctgtaggtattagtgagaagcgaataagataacacatacaaaatgtttagcacggtatttcgcacatagtacgtaggtactcaaacattagctttttttttttttttttttttcctgagacggagtctcgctctgtcatccaggctggagtgcagtggtgcaatctcggctcactgcaagttctgccttctggattcacgccattctcctgccccagcctcccgagtagctgggactacaggtgcccgccaccatgcctggcaaatttttttgtattatcattatttttttttgagacggagtcttgctctgtcgcccaggctggagtgcagtggcgtgatctgtgctcactgcaagctccgccccccaggttcatgccattctcctgcctcagcctcccaagtagctgggactacaggtgcccaccaccaagtacrgctaatttttttgtatttttagtagagatggggtttcaccgtgttagccaggatggtctcaatctcctgaccttgtgatccatccgcctcggcctctcaaagcgctgggattacaggcatgagccaccacgcccggccagctattattattttttagagagagggtctcactctgtcacccttgctggagtgcagtggcatgatcctagcatgctgtagcctcagactcctgggcttaagtgatcctcttatgtcagccttccaagtagctaggactacaggcatgctctaccatgtcagcttttaaaattattttatttattttttaatttatttattgttttgagacagagtctcgctgtcgtccagactggagtgcagtggcacgatcttggctcactgcaatctctgcctcccgagttcaagcgattctcctgccttggcctccgaagtagctggaactacaagcgtgcgccaccacacctggctaattgttgtatttttagtagagacggggtttcaccatgttggccaggttgttctcgaactcctgacctcaggtgatccacccacctcagcctcccaaagtgctgggattatagacgtgagccaccttgcctggcctaaatttatttatttatatgcagagatgggggtctcaccaagttgttcaggctggtctcgagctcatggcctcaagtaatcctcctgccttagctgcccaaagtggtgtgattacaggtgtgagctaccacgcccagcccacctaatgcctttcttgaaattattgccaccagtgccattttggatccattgctgaagaaaatttattagttagtacggtttatttggggaagttgaattaaaaatatatttgaggctgggcgcagtggctcacacttgtaatcccaacactctgggaggccgaggcagataggtcacttgaatccagaagttcgagaccagcctaggcaacatggtgaaaccctgtctcttattaaaaatacaaaaaattagccaggtgtggtggtgcatgcctgtagtcccagcttctggggaggctgaggcgggacgattgcttgagcctgggaggtcaaggctatggtgatccctgatcataccactgcacttcagcctgcacaacagagtgagaccctgtctcaaaaaaggaaagaaaagaaaaagacatttgaaaggtttatcgtgagagaaaagggttaactcttaaaatgatgaaagcatgacaagtttataaaggagtttaagaggagtttgtcagcatgtctgtgacactaaacagtacttcccaggctggtcgtggctgaagggggttcaggttagatggtgctctcagcgctttcctgtgatggttctcttggagccctgctcccccggggcatctgcagcccttaggatgcttctcactctgggatgagttgacattttcttttctcttaggtgtcttttctggcatggaaagttagaaacaatggggacatattctgcctcttataatattaactataaaattatgaaacatggggcacagtgcgcctgtaattacatctactcaggaggctgagacgggaggatcacttgatcctggaattacaaaccagcttgggcaacacagtgagactggtctcccaaaaaaattatgctacttgggaggctgaggcaggagaatcgctggaacctgggaggcagaggttgcagtgagccgagatcacgccactgcactccagcctgggcaacagagtgagactccgtctcaaaaaagagaaaattatgggccaggcacagtggttcatgcctgtaattccagcattttgggaggccaaagtaagaggattgcttgagcccaagagttggagaggagcctgggcaacataggaagaccctgtctgaaaggaaaagagaaaaattaaagaaaaattaaagcaaaagaaaaattgaaaaattagctggtggtggctcacacctgtagttccagcctcttgggaggctgaggtgggagtattgcttgagcccaggagttgaggtgagccgtgatcgtgccactggactccaggcagggtgacagagcaagaccctgtctcaaaatggaaaaaaaagaaaaatattttcagttatgtgtgagtcctatgcatatacctagaattggaggcattaattttaggtggtctcattcaacgggataggcttttggaacactggaaagctactgtttctattcagacatacctgggtgcaagctttgtcaccttccacatgagccgcctgaacaagaaccagggagtacagtgtttgtaaacttttctttttttttttttttttttgtttttttttgagacagagttttgctcttgttgcccaggctggagtgcaatggtgaaatctcggctcactgcagcctacgcctcctggattcaagcgattctcctgcttcaccctcccgagtggctaggattataggtgtctgccaccacacctggctaatttttatatttttagtagagacagggtttcgccacgttggccaggctggtctggaactcctggcctcaggtgatccgcacatctcggcctcccaaagtgctgggattacaggtgtgagccaccgcacctggcccttttttttttttttttttttttttttgagatgaagttttgccctgtcaccccagctggaattcagtgacgcaatctcagctcactgcaacctctgcctcccaggttcaagcagttctcctgcctcagcctcccaagtagctgggactacaggcacccccccaccatgcctgtctaatttttatatttttagtagagatggggtttcaccatcttagccaggctggtctcgaactcctgaccttgtgatctgcctggttcggccccacaaagtgctgggattacaggcgtgagccaccacgcccggccttgtaaacattttcttattgacagtagctgtcagcctgcatgcagcacttactgtgtgccaggcgctgctctgtgtccttcgcgtacaataactcatttacgccgaactctgttgccatccctactgaggcactgagatctcaagtcagttgtccatgctcacatagtcggtaagtgccagtgtggacttgaacccagatagtcacttccttaacctttgtgccatattgcctcttgatcagcaaataccttgccttttttttttcccccaatttgaaatgatattaggcacccagctaggtgccgaagatacagagatgagtgagagagtgtttgcttttaaggagtttgtgatctaatacgggactgtccagtagaattttctgcagtgacagaaatgttctcctcaacatggcagccgtcagtcgtgtgattattgagctagtgtgactgaggaacagaatttctaatttttttctttctctcttgcttttttttttttttggagacagagtctcactctgtagcccaggctggagtagagtggcacgatcttggctcactgcaacctctgcctcccgggttcaagtgattctcttgcctcagcctcctgagtagctggaattacaggcgtgcaccaccatggctggctaattttgcatttttagtggagacagggtttctccatgttggtcaggctggtctcgaactcccgacctcaggtgatccgcccacctcagcctcctgaagtgctggggattacaggcatgagccactgcgcccagctgagaatttctaatttttaaaaatattaattactaattatttaattttagttttttatttttataaaaatagagaaggggtctccttatgtttcccaggctggtcttgaactctgggctcgaaggaatcctcccttcttggcctcccaaagtggtgggattacaggtgtgagccaccttgcccagcctaattttaattcagttttacatggtcacaagtgtctaatggtaagacctggcgcagtcattcatgcctgtaatcccagcactttaggaggctgaggcgggcaaatcacttggggttaggtgttcgagaccagcctggccaacatgacgaaaccctgtctctactaaaaatacaaaaattagccaggtgtacctgtacgtgcctgtaatctcagctacttgggaggctgaggcaagagaatcgcttgaacccgggagatggaggttgcagtgacctgagattgtgccactgtactccagcctgggcgacagtgacccatctcaaaaaaaaaaaaaaaaagtgtctagtggctaccaaattggatagcagtgaattgaacagatctagtgggaaaaataaaacaaagttaacaaataacaatgatacatcaaagcatgacctgatacatcctcagagcaaggccgtcccagctagacgactgatacatccaatcattcatcagtgtgctgatattattcccttaatatgtgtcagtttttttttcttcttcctcacatttactgccaagtgaacataccaattttcaggataagttcttccagaaagatggtataagccctgaacttcagagactggtgaagaagcccacgttttaccacatcaacctgtggctgttagatctggcaggcctttcccctctgcaggtggtgtcactcgtggtggtggggactgttagggagctaggttcaaggagaaactgctccatgagaggctaccctctgctttggctccaccaggccacctgttctgacaagtgtctatattccaggcatgttaatcatgaactgcacagttagtgtgtggtcgtctcttcctgctagtgtgtggccacctgacatcacttgcaccctttaaaagttgaactgctgtccttctcttttagtttaaacccattttcctgaacacaattgacccatctcaccccatggcaaagctgagcagagctgccaatacccagaagtgcatccgggctgggggcaaacataatgacctggacgatgtgggcaaggatgtctatcatcacaccttcttcgagatgctgggctcttggtcttttggagattactttaaggtaagttcagagcagaagaaccactagggttttgaggaaaatggtcttttccacactgggaactgggttctaattttgcatgttttaaaatatgaaatatcatctaggtgattcaggaatgaatggcatttattaattctaagacttcctggaagtagtacctataatttggtgatttcagtatatatttggatttcttacataaactgatcttgaatttgaatttagagtgaacatgttgtgattttgtatctgtgttcctagcatctggtctcatactaaatagattttggtttggcaatgttccatatctttctctctgttctttttgtaggaattggcatgtaagatggctctggaactcctcacccaagagtttggcattcccattgaaagactttatgttacttactttggcggggatgaagcagctggcttagaagcagatctggaatgcaaacagatctggcaaaatttggggtaagaatgcacatcacttcttgagagtatggaggagtgaaatgacactcagtgccagagtggggttttatgacctggaatatgtggtcattttgcatctcagggttccttttgagatgcacatggggaggagtgaggctagagaatcgcttgaacccaggaggtggargttgcagtgacctgagatcactccactgcactccagcctgggcgacagagtaattatctttagatgcattaatatctttatttatttatttatttatttttttgagacagagcttgctctgtcagctaggctggagtgcagtggcacgacctcggctcactgcaacctctgtctcctgggcttaagcaattctcctgcctcagcctcccaagtagctgggattacaggcgtgtgccaccatgcccagctaacttttgtattttttttagtagagacggggtttcatcatgttggccaggctggtctcgaactcctgacctcaggtaatccaccgtgcccggccgcattcatatggtttttttttttttttttttttttttgagatggagtcttgctctgtctcccagactggagtgcagtggcgtgatctcagttcactgcaaactctgcttcctgggttcatgccattctccttcctcagcctcctgagtagctgggactgcagatgcctgccaccacacccagctaatatatatatatttttgttgttgttgttgttggagtctcgctctgtcacccaggctggagtgcagtggcgcgatctcagctcactgcaagctccgcctcccaggttcacgccattctcctgcctcagcctccygagtagctgggaytacaggcrccyrccaccacgcccggctaattttttgtattttttagtagagacggggtttcaccgtgttagccagggtggtctcgatctcctgacctcgtgatccgcctgcctcggcctcccaaagtgctgggattacaggcgtgaggaaccatgcccggccaattgtttttttatatatatatattttttagtagagactgggtttcaccgtgttagccaggatgatctcgatctcctgacctcgtgatctgcccgccgtggcctcccaaagtgctgggattacaggcatgagtcaccacgcctggcycatatctttagatccattcgttgcttcttaatatgttcaataattctgttgtttatgtttgtttgtttgtttttgagacagagtctcagtctgtcacctaggctggagtgcactggtgcgatcttggctcactgtaacctctgcctcccgggttaaggcgattcttctgcctcagcctcctgagtagctgggactacaggtgcgcgccaccacacctggctaatttttgtatttttagtagagatgggatttcaccatgttagccaggctagtctcaaactcctgacttcaggtgatccacccgctttggcctcccaaagtgctaggattacagatgtgagccactgtgcccagccaatcattctgttgttgaaagccaaaacaagtctttttttttttactttatatagttktaaaagttacacgtgtgttgtaaaaattcaaaccttatagaaatgtagaaaatagaaagtggaagttccctcaatcatcattaatagtttaatatcccatatctagtcttcctggccttgttcatagttctgtaaccttgtgtgtatgtgtgtatcttttccttccccacccccactccactcccccacccccgccgagatggaatctcgctctgtcgcccagagctggagtgcaatgacgcgatctcagctcactgcaacctctgcctcctgggttcaagcaattctcctgcctcagcctcccgagtacctgggattataggcacacactaccacgcctggctaatttttgtatttttagtagagatggggtttcatcatgttggccaggctggtcttgaactcctgacctggtgatccacacgcctcggcctcccaaagtgctgggattacaggtgtgagccaccgtgcccagccatgtctgtctttttcaacagagttgtattcttcatatgaaacagtttgtttcttatggaaatgaaatagactaggagaaaggaaatttttttttctttttttgagatggagtttcgctcttgttgcccaggctggagtgtgatggtgcgatcttggctcaccgcaacctccgtctcccggattcaagcaattctcctgtctcagcctcccgagtagctgggattacaggcacgtgccaccacacccagctaattttttttttttttttcttagtagagacgggtttctccatgttggtcaggctggtctcgaactcctgacctcaggtgattcacccacctcggcctcccaaagtgctgggattacaggcatgagccaccacaccaagctggaaaaaggaatttttttgtttcgtttttttgagacagggtctcactctcacccaggctggagtgcagtggcataatcatagtttactgcctgagctcaggcgatcgtcccacctcagcctcccgagtaactaggactagaagcattcgccacctgcctggctaatttttttttttttttttttttttttggagacggagtcccgctctgtcgcccatgctggagtgcagtggcgcgatcttggctcactgcaagctccgcctcccgggttcatgccattctcctgcctcagcctcctgagtagctgggactacaggcgcccaccaccacgcccggctaattttttgtattttttagtagagacggggtttcaccgtgtcagccaggatggtctcgatctcatgacctcatgatcggcctgccttggcctcccaaagtgctgggattacaggcgtgagccactgcgcccggccctgtctggctaatttttgtattttttgtagggacagggttttgctatgttgcccaggctgatcttgaactcctgagctcaagcgatctacctgccttgacctttcaaattgctgggattacagatatgagccactgtgcctagccagtttttttggcataatgtaattctaaagtataatcacatagtataaaagctaagacagtaggtgagctatatgtgttctgtgctgtgaacttggtcgaatttgtgaagtgctgcatcaaggagaatctgaacatggggtgtgtgccctctgtagacagctgggctgtccatgatgtgtttgcctcattttcttgttccttttacttaattctttcatcctttagtgcatagctttttactatacttggaaacagggctgcttctctttttttaattacttttactctagatatattattccaacccaacttccccttttacttgatctaaaactcctattcggttgactctgtagtctaagtgtagttggaattttgggtagtgacacctgtaaaaattaaatattaatcttgacgctggtttttaaaatcctcttttaccttgacttcatgtactgtatatctacactttaaaagtgtagcttttaaaagataagcaagcacaatcttttgtgtgtgtgtgtgtgtgtgtgtgtgtgtgtgtgtcacccaggctggagtgcagtggcatgatcacagctcactgcagcctcaacttcctgggctcaagtgatcctctcccgagtagctgggactacaggtatgcatcacccccccagctaatttttttttgtattttttagagagtcggggtttcgcaatgttgcccaggctggtctcgaactcctgagctcaagcaatgcgcgtggccagcgttttcattattatgtgttcctttctaggccttactcatgtccttgtgtattttcattgagtttcgagcatatcatgtgtatattttgtactgtcttctattgtaggcactcttgagaagagtcatgtgctgtttctttagcgggttttttttttttttttttttttttttttttgagatggagttttgctctcgttgcccaggctggagtgcaatggcgcgatcccggctcatcgcagcctctgcctcctgggttctagtgattctcctgcctcagcctcccgagtagctgggattacaggcatgcgccaccacacccagctaattttttgtatttttagtagagacaaggtttctccatgttgatgaggctggtctcaaactcccaacctcaggtgatccgcccgcctcggcctcccaaaatgctgggattacaggcatgagccaccacgcccagcttctttagcaggtttaatgtgcaggcttagcattagtacttgctgaaggttggaacttcttcattaaaaattctaagaattttttttttttcttttttgagacagagtctcgctctgttgtctaggctggagtgcagtaacatgagccactgtgcccggccaatcctaagaatttcttttgcggtggttgcaagtctgggcagaactcttgtcaggggctgtaactggacttatctttactcctttgtcaggctggatgacaccaaaatcctcccaggcaacatgaaggataacttctgggagatgggtgacacgggcccctgtggtccttgcagtgagatscactacgaccggattggtggtcgggacgccgcacatcttgtcaaccaggacgaccctaatgtgctggagatctggaaccttgtgttcatccagtataacaggtrgccttgggttcctactccattcctttccttgagctgagcaggggaggaggaactcggagctgtgtagctctcttctcagctaaaagctcatttctttatttctcagattacctgtctgatctctggaacaaggatgggcctattctttcatgaactaaaccttatcgcacataatascttcttgcgagctattcctataatgtcatgcttgctgtacttcgggctgctgttttttttttttgtttttttgagacagagttttcctcttgttacccaggctggagtgcaatggtgtgatcttggcttactgcaacatctgtgccctgggttcaagcgattctcctgcctcagccttccgagtagctgggattacaggcatgtgccaccacgcccggctaattttgtatttttagtggagacggggtttctccatgttggtcaggctggtctcgaactcccaacctcaggtgatccgcccgcctcagcctcccaaagtgctgggattataggtgtgagccaccgtgccagaactggactgctgttttaaagcctatttccttgaagcttgcctcagttttgtttttgtttttgtttttgtttttggagatggagtcttgctctgtcacccaggctggagtgcagtggcaagatctcagcccactgcaacctttgcctgctgggttcaagcgattctcctgcctcagcctgctgagttctcctgcctcagcctcctgagtagctagggttacaggtgcatgccaccatgccaggctaatttttaaaatatttttggcagggatggggtttcatcatgttggccaggctggtctcgaactcctgacctcaagtgattcccccgcctcggcctcccaaaatgctggtattacaggcgtgagccaccatgcccagtctttttcttttcttttttttttttttttttgagatggagttttgctcttgttgcccaggctgtagtgcaatggtgaaatctcagctcaccacaacctccgcctcctgggttcaagcgattctcctgcttcagcctcccgagtagctgggattacaggcatgtgccaccatgctcggctaattttgtatttttagtagagatggggtttcttcatgttgagcaggctggtctcgagctcctgacctcagatggtccaccacctcggcctcccaaagtgctgggattacaggcatgagccactgcgcctggcctttcctcactcttaaatgaaccccagagttcatttaagaatgaactcttcctttctccttcctttctccctccacttccctcttcccaccaaaccgggcaaatggcagatggtcacagcctgcaaactgttctgtaaatgaattttaaccagcagggactggagaggtggcagcttgagtctctgcttcaacctcctcttcttctggatcatacagggaagctgatggcattctgaaacctcttcccaagaaaagcattgacacagggatgggcctggaacgactggtatctgtgctgcagaataagatgtccaactatgacactgacctttttgtcccttactttgaagccattcagaaggtactggtgctattgcaaacattgtaaacttctgtggagttttccaggctgtactcttaacagtgctgtcaaagaaaaaatgaccatatgctttgccagccaagggtacccatttccatctgcctacttcattgttaataatgtgaggctccacaaattggtgttctaaatgtcttaagaacctaattaaatagctgactacaaaaaaaaaataataatgtgaggctctagacctgagacagtataatttttgagtgtaggggctggctggagtctctctacttccccaatgtcacgttcttggggttataggatctggcaagaccggcatcctttctgctaatgctcctcaatcctccaggaacctccttgggcaaggtagcgccagaaagtctgcttcctaaagggctgcctcctgattcttatctatagggcacagrtgcccgaccatacactgggaaagttggtgctgaggatgccgatgggattgacatggcctaccgggtgctggctgaccaygctcggaccatcactgtggcactggctgatggtggccggcctgacaacacagggcgtgggtaagtatgctgcacactgggtggtgtttggagcggcaccacgtgtgctatgtgtgactctttatgaaacttttctttgtgtgtgagattgagtgttgctctgttgcccaggctggagtacaatggcgtgatcttgcctcactgcaacctctgcctgctgggttcaagtgattctgcctcagcctcccacgtagctgggattataggtgcacaccaccacgcctggctaatttttgtacttttagtagagacggttgttttttttttttttttttttttttctgagacagaattttgcttttgttgcccgggctagagtgcaatggcccgatcttggctcaccgcaacctccacctcctgagttcaagcaattcttttccctcagcctcccgaatagatgggattacaggcatgagccaccatgcctagttttgtatttttagtaaagatggggttccttccatgttggtcaggctggtctcaaactcccaacctcaggtgatccgcccgcctcggcctcccacagtgctgggattacaggcgtgagccaccgtgcccggccagaggtggggttttgccatgttggccaggctggtctcgaactcctgacctcagatgatccacctgctacgacctcccaaagtgatgggattacaggtgtgagccaccatgcccggcctctttatgaaacttaaagccatctttcgttattgtttccttgtcttgggcaggtggaagaatcccccaccccttttttaagggatgaagggagtttcagctagtgtcacagagttgccactatattaaatctctgctgctgagtacagatgataaggattgtattcaaagttgcctgataggagattggcaggggcagggtgagggtaggtattgaccagccctgggaatctctcttactgacaggcaggacctgggatcacaggcatcaagtacacatctggtctgtccatcttycctccctctatgggtaactgaatgtgaaaggaaaacaaaccagcgtttaccctagggaagccttgacgggtatttgtgggtatgttactgagtcttgtgctaaaattaatgaccttggggaatgcgaaagaagcaggcttaggataaaagaaagttcctgaaagaggtgttgctttgggtaggattccaagggactcamgacaaaaccctcagctgggaacgttggggactagtttttgcctcttacagatatgtgttgagacggattctccgccgagctgtccgatacgcccatgaaaagctcaatgccagcaggggcttctttgctacgttagtggatgttgtcgtccagtccctggtaggtttatttctctgcttacccttctgtgctaaagcagtccgttaagagggatggagtgggagagggcatactgttaagcagctttttgttgctgttttttgagacggagtctcactctgtcacccacgctggagtgmaatagagtgatcttggctcactgcaacctctgtctcctgggttcaagcgattctcctgtctcagccttccgaatagctgggattacaggtgcacaccgccaagcctggctaatcttttctgttttagtagagacagggtttcaccgtgttgcccaggctggtcttgaactcctgagctcaggcaatccacctgcctcggcttcccaaagtggtaggattacaggcgtgagccactgcacccagctaaggagcttttttaagacggggcagggaacagtctctggcttcatccagcccctcatcttgcttcccctttgtcagggagatgcatttcctgagctgaagaaggacccagacatggtgaaggacatcattaatgaagaagaggtgcagtttctcaagactctcagcagagggcgtcgcatcctggacaggaaaattcagagcctgggagacagcaagaccattcccggtaggtaccagtttttgcccttctccatcctggccgtttgatctttctgggaaagacaagccctttctgacagactgactgtgggctctcatgtctctgaggctgaacatagcttgattgaattgcttttggtgcaaactggaatttatagtaaaatggtaaaagtaatgcatcattgtggccaaagtattcaaacaatacagaatacaaaagtgttcagaaaatgaaaatcctcttttccacactcatttctcagagggaacaactcttaatggtttggtgtagaactcttcaggattcttctctgtttgcatgcaaatacatgtagatatttgtgtgtgtgtatttttcaagcaaaagtgggaatatttggtatgtactgttttgcaatttggggaaaattaattccaaagattttctccccagtttccaaagattctttattgaagtataatgaacaagggaaaagcttgatgaattttcacaaattgaacacacattcagatcaagaaatagatttgtcagctgggtgtggtggctcacacctgtaatcctagcactttgggatgccgaggcgggcggatcacgaggtcatgagttcaagaccagcctgcccaacatggcaaaaccccgtctctactaaaaatacaaaaaattagctgggtgtggtggcatgcgcctgtaatcccagctacttgggaggctgagacaggagaattgcttgaaccggggaggcggaggttgcattgagccaaaatcatgccactgcactccagcctgggcaacaagagcgaaacaccatctcaaaaagaaaaagaaaaagaaatagatgtgtaaggctgggcacagtggctcacacctttaatcccatcactttgggaggctgaggcaggcagatcacctgaggtcaggaatttgagaccagcctggccaacatggtaaaaccccatctctactaaaaatgcaaaaattagccatgcatgatggcgggcacccataatcccagctactcgggagactgaagcaggagaatcgcttgaatcctggagctggagagtgcaatgagccgagatcacaccagtacactccagcctgggcaacagagtgagactctcaaaaaaaaagaaatagaaaattgtccaggtgaggttgtttttgtttttgagatggagtctcactctgttgcccaggctggagtgcagtggtgtgatctcagctcactgcaagctccgcctcccagggtcatgccattctcctgcctcagcctctctagtagctgggactacaggtgtccgccaccgcgcctggcaatttttttatttatttttttttattttttatttttgagacagagtcttgctctgtcgcccaggctggagtgcagtggcgctatctcggctcactgcaagctccacctcccgggttcacgccattctcctgcctcagcctcccgagtagctgggactacaggcgcccgccaccatgcccggctaatttttttgtatttttagtagagacagggtttcaccgtattggccaagatggtctcgatctcctgacctcctgatccgcccgcctcggcctcccaaagtgctgggattacaggcgtgagccacagcgcctggccaaattttttgtatttttcctagagacggggtttcaccatgttagtcaggatggtctcaatctcctgacctcatgatccgcccgcctcggcctctcaaagtgctgggattacaggcgcgagccacggtgcccagcccaggtgaggtttaaaaaacaaaacaaaacaaaacagaattgtatcaggacatccattgtgcttcccccaggttaactgaaaaagatgtgctggattttctgatgggcacacagggccgatactgatagccttgtgtctttaattccttctgccagtcccagcatccttttggagggcttggcatggaaaaggggctgtctgttttttttgacacacctcctttgtgctgtgtaggagacactgcttggctcctctatgacacctatgggtttccagtggatctgactggactgattgctgaagagaagggcctggtggtagacatggatggctttgaagaggagaggaaactggcccaggtaaagaacttggagagtgarcaggaaacccaacaccttscaacccagcaccacttggctgcagactgagcatgagtttccttccattaaagtctttgaagtgctttttcccctagatcagtggttctcaagtgggggcgagtctgccttccagggagtaattggcgataatgtctgaagacatttttgattttcacaactaggggcagatcctgctgtcacgtacttggtagaggccagggtgcccctcagcatcccacactgcaagagaagtttccacaacagagaatgatctggccccaaatgtcagtagtgccaggattgaaaaaccctgttctggcagtttatgctgggcatagtttagcaagttccagtcctttggagtcccttttctcctactttacggtaacttatgcttgtttctcttgctgacagctgaaatcacagggcaagggagctggtggggaagacctcattatgctggacatttacgctatcgaagagctccgggcacggggtctggaggtcacagatgattccccaaagtacaattaccatttggactccagtggtagctatggtatgttgctgtgctccttccacatctgagcattctgccccgtatctggggggtatttgaaagattgtttctcaagattagctctccagcagactgctgacagcctctcctggagtgccgtacagtcacgctatgcacttttatacacataggcacccttggctggaggttttcttaactctattttgaaataattattgtcacaggaagttgtaaaaaaaaaaaatttgtaggaagggtctcacacccttttatccagtttcccctaattgtaacatcatgcaggaaactgggcaattgacattgatacaatccacagtgactatcagaatgctattaggggcctggcgctgtgcctcacacctgtaatcccaacactttgggaggccggggcaggtggatcacctaaggtcaggagtttgagaccagcctgaccaacatgatgaaaccccatctctactaaaaatacggaaattagccgggcgtggtggcgtgcccctgtaatcccagctactcgggaggctgaggcaggagaatcgcctgaacctgggaggcagaggttgcagtgagccaagatcatgccattgcactccagcctggacaacaagagtgaaattccgtctcggggaaaaagaaaaagaatgctattaggattctattatcctaatgctgttagaatgctattatcctaatagcattcttttttttttctgagatggaatctccctctgttgcccaggctggagtgcaatagtgtgatctcggctcactgcaacctccacctcctgggttcaagcgattctccggcctcagcctcccaagtagctgggattacagccacgcaccaccacacccggctgatttttgtgtttttagtagagacagggtttcaccatgtttgccaggcaggtctcaaactcctgacctcatgatctgcctgccttggcctcccaaagtgctgggattacaggcgtaagccatctcgcccgaccggataatagtattctaaagttaagaaacaaagccagtgcaatgactcatgcctgtaatcccagcacttcgggatgccagggtgggctgatcagttgagctctggtgtttgagaccagyctgggcaacatggcgaaaccctgtctctaccagaaatacaaaaattagctaggtgtggtggcgcatgcctgtagtcccagctatttgtggggctgaggcaggaggatcacttgagcctgggagattgagaggctgcagtcagccatatttgtgccactgcactccagcctgggctacagagtgagaccctgtctcaaaaaaaacataaaaataaattggcaatacatgtttttgcagcttttttgccctggtagagaacaatcttttttttttttttgagatggagtttcgctctgtcacccaggctggagtgcagtggcgcattctcggctcactgcaacttctgcctcccagcttgaagtgattctcctgcctcagcctcccaattaactgggattacaggcatgtgccaccacacctggctaatttttgtattgtagtggacacggggtttcaccgtgttggccaggctggtctcaaactgctgagctcaggttatccacccgtctcagcctcacaaagtgccaggatgacaggtgtgagccaccgtgcccggctgagaacaatcttacacctaaatctattcaagcaagcctacaaaatgagtacattctttgtgagttgaccttggactagggaatttattactactcttaaagatctactaatctgatgcaccaagtttctgttcagtagctcagagttagggtaacccattgtcccagttttaacactgaagcctgcatcccaggaaacccctcagtcctaaaaattgggacagttggtcacccgacagagtgttgcattctttgatggaaagccagcatgcgaagccctttgttgttgttgtttttttttttttttttttttttttttttttgagaccgagtcttgctttgtcacccaggctggagtggagtggcacaatctcggctcactgcaagctccgcctcctgggttcacgccattcttctgcctcagcctcctgagtagctgggactacaggtgcccgccaccacacccggctaatgttttgtatttttggtagagacagggtttcagcgtgttagccaggatggtctcgatctcttgaccccgtgatccgcctgcctcgacctcccaaagtgctgggattatagggggagccaccgcgcccggccgcgaagccctttcatattgtctaatgagtttgcttccaaaatacaattggacaattaggagctaagaagagtttgcgaaagagaatccagcaaaagtcagccaagaaggagtgaaaaggtcattgaccccactgtcccctttctatgcatttcccttgagcagtatttgagaacacagtggctacggtgatggctctgcgcagggagaagatgttcgtggaagaggtgtccacaggccaggagtgtggagtggtgctggacaagacctgtttctatgctgagcaaggaggccagatctatgacgaaggctacctggtgaaggtggatgacagcagtgaagatgtgagccaacagttcttccttgttagccgaggagggccaggcgtggagccggggagctgcttttgccccacagtgctccaggccttgggagcagacctgacacacctttgggttgggttccatggtatttctgaagccgagggagctgttgcttgtacctgttgctttcctggccatcgggtaccctcgtaggagtatttttgcagccagggtacaagtttcctacaagctttgcacattaaaaaggagaggcagctctctgaaggggagatgtccttgtagaaaactcagcctcgagctctgccgctgctgaatgagttactttgtctccctaggcttcaggttccttatggaggcttttagatactcaaagatgcggctgggtgtggtggctcatgactataatcctagcactttgggaggccaaggcgggtggatcgcctgaggtcaggagttcaagaccagcctggccaacatggtgaaaccctgtctctactgacatacaaaaattagccaggtatggtggtggatgcctgtaatcccacctgctcgggaagctgagaggggagaatcgcttgaacccaggagagggtggttgcagtgagccgagattgcgccactgcactccagcttgggtggctgagcgagactctgtctcaaaaaaaaaaaaaaaattctaagatgctccttaatattggttatgtctgtgtgtgtgcacaaatatatttaattttttttttttttttttgagatggagtctcgctctgtagccaaggctggagtgcagtggcatgatcttggctcactgtaacctctgccttccgggttcaagcgattctcctgcctctgcctcctgagtaggtggaattataggcacttgccttcacgcctggctaatttttgtatttttttagtagagatgggatttcaccatgttggccaagctggtctcgaactcctggcctcaggtgatctactcacctgagcctcccaaagtgctgggattacagtcatgagccactgcacctggcctatttaatcatatttaatgatattaagggagtatgtgtgtgtgtgcaatttacatatgtaaagagaagttatatacacgagtttatattgaaaatataagaaaatttgtatgtttttaaggatttatttattggtctcttccttgacccctcttagaaaacagagtttacagtgaagaatgctcaggtccgaggagggtatgtgctacacattggaaccatctacggtgacctgaaagtgggggatcaggtctggctgtttattgatgaggtgagttgggttactgtggcccccattggatctggttagtaattatcttctcctctggctttaaattgtcctgtcactgttgggccgggtgtggtggctcacacttgtaatcccagcactttgggaggccgaggcgggtggatcatgaggtcaggagatcgagaccatcctggctaacacggtgaaaccccgtctctactaaaaatataaaaaatgagctgggcgtggtggcaggcgcctatagtcccagctactcgggaggctgaggcaggagaatggcgtgaacccgggagggggagcttgcagtgagccaagatcccgccactgcacaccagcctgggcaacagagcgagactccgcctcaaaaaaaaaattgtcctgtcactgttatcactccctagtgtaagtagaccgcaggggttaatttaggtgcatttggtggattgtgagggatgcaactaagagttaatctatatgttcccaagtcagtgatttcaccagtgatttcagttaagatcccgtggacttgttttcacggattgcttttctaacgtcacctacttctttgggagccaaggatgctgaagaatgaagaggtaggctctggcatgtgacagagctccagagtaagagtagcttaaaaccaggatagcagtgtatgttctaaaaagctcaagctgatacggaggctctgccccacagtcagagggcctggtttctcctcacctgtcactccaccttctttcctggggcattgcctttgatttcctggttcagaggatagctatcagatccattgtctaggccaggggttggcaaactttgtgtaaataactggatactaaatatttttggctttgctgaccacatgttcctggtgatgagtactcagctctatagttggagtgttcaagcagccattgaccatatgtaaatgaacaggtgtggctgtgttccaataaacctgtttatggctgggcacagtggctcatgcctgtaatcccggcaytttgggaggccgaggcgagcagatcacctgaggtcgggagttcgagaccagcctgaccaacatggagaaaccctgtctctactaaaaatacaaaattagccgggtgtggtggtgcatgcctgtaatcccagctactcaggaggctgaggcaggagaatcgcttgaactcgggagatggaggctgcagtgagccgagatcatgccatagcactccagactgggcaacaagagcgaaactccttataaaaaaaaaaaactgtttataaaaatttataaacacatacatttggggaggctgaggtgggaggattgcttgaggccaagagtttgagacccagcctgggcaacaacatgagaccccatctctacaaaaaaataaaaaatattagttgggggtagtggtgtgtgcctgtagtcccagctacttgggaggctgaggcaagaggatcacttgagcccaggagtttgaggtggcactgagctacaatcgcgccgctgtactctatcctgggtgacagagcaagaccctgtctctaaaaatgaaaagacagatgacaggctagatttagccatcggccgtcatttggcaattcctgttctaggcggtggaaaagaaatgggaggacctgccccatccctttaatggtagacatcacttctgttcaaaaccttttgacccgaacttagtcacatggacacacttagccatagggaagctgggaaatgtaacctttattctgcacagccatatttccaactaaaaattgtagcactcgggggagcagataacgaggagataactagcagtctattacagacctctccatgagcccctctgccctttccagccccgacgaagacccatcatgagcaaccacacagctacgcacattctgaacttcgccctgcgctcagtgcttggggaagctgaccagaaaggctcattggttgctcctgaccgcctcagatttgactttactgccaagggagccatgtccacccaacagatcaagaaggctgaagagattgctaatgagatgattgaggcagccaaggtaggatgggcgacggctgaatgccccccctccccacaccgtcactgtctgtccacagtcttagcagtgcggtgctctcactctgttgtatcagattcgtcctgcacgtagatttgcttaaagcaggctgggcacggtggctcacgcctgtaatcccagcactttgggaggccgaggcgggcggatcacgaggtcaggagattgagaccatcctggctaaccctgtctctactaaaaatagaaaaaattagccgggcgtggtggcgggcacctgtagtcccagctactcaggaggctgaggcaggagaatggtgtgaacccgggaggtggagcttgcagtgagccgagattgcgccattgcactctagcctgggaaacagagcgagactccgtctcaaaaaaaaaaaaagtttgtttaaagcagtgattctccatctgtgcttttgccgggggcagtggtggtggttggtggaggggagagggagaggcatttgtcccaccccaccttgggagaaccagagctgttctagttaagtctgttcacatatgagatttggtccacagtttaacaaaatagttggaaattcccatactgatgcccttgactttgcacgtggcgtgtgattgaggaagctcatggcacgtgctaggccaagccaggttggaacccgagtcctgcctgcaggaccatgctttcctgcctcgtcgtaccgcacctccagggatctcttccagctcttttctgtcttcttggtctggcaggccgtctatacccaggattgccccctggcagcagcgaaagccatccagggcctacgggctgtgtttgatgagacctatcctgaccctgtgcgagtcgtctccattggggtcccggtgtccgagttgctggatgacccctctgggcctgctggctccctgacttctgttgagttctgtgggggaacgtgagtactgcagaggggcagagtagacaggtcatctaccttcatcctctgaggatgtaggtcttaggctggaccaactcttgtctgtctaaggttgaagtgaagtcctcagaaatgccgttgctaaatagcgttcccaagaatctcagcatcctagcatgctcattagatccctgtatctgaaggtaacatttcctgacgaaacattcccaggaggaaaagggggaaaacattgtattcacattaccacacagttgcttgctgttgtttgctgggctgaaactagcaagaaggcttgtgtgaatttgggattcagcaaggcctggagtgcttgttgagctcttgatgtgggcctagcccttcccattcctggtatctcacctaatttcctttgacagcttgggcggcatctggggaatgtagctccattgtctcagagcccccgagcaggccacgtggttgactcagctcagtttggcttgggatagccacttctgccaatttggattcctctgtatctctctgggcctttttgggaaggtcatggtggcctggaaagtttctgcttccaaatgaagccttgtgaaaagaattgtggttttttttgtttgtttttttgaagtggagtcttgctctgtcccgcagggtggagtgtagtggcacagtctcggctcattgcaacctctacctcctggcttcgattctcatgcctcagcctcccaagtagctgggactataggcatgtgcccccatgcccagccatgaagagaacattctttttttttttttgagacggagtttcattgcccaggctggagtgcaatggcgcaatcttggctaactgcaacctccacctccagggttcaagcgagtctcctgcctcagcctcctgagtagctgggactacaggcacacaccaccacgcccagctaattttttgtatttttagtagagatggggtttcaccctgttagccaggatggtctccatcttctgacctcgtgagccacccacctcagcctcccaaagtgctgggattacaggtgtgagccaccgtgcctggcctaattttgtatttttagtagagagggggtttctccacgttggtcaggctggtcttgaactcctgatctcaggtgacccacccgcctcagcctcccaaagtgctgagattacaggtgtgagccaccacgcccggctgaaaagaacattcttaatgtcatggttgagaccctccagggtctcctgcaggcctctggcaggcagggagcaagtaggatgtgcagagagtaggataggggcctgggggattgagttcaaggcttttctgcccagctgaattgggccttcaaacgagtcccactttgcctgattacctgtttgctcataccctttagactacaggaaacagctttcaaaaactttataccaagggttgggtatgttgcctcatgcctttaatcccagcacttagggaggctgaggcaggcagatcacttgaggtcaggagttcaagaccagcctgtgcaacatggtgaaaacctgtctgtactaaaaatacaaaaattaggagtggtggcgggcacctgtatccaagctacttgggtggctgaggcaagagaatcatttgaaactgggaggcagaggttgtggtgagccaagatcacaccattgcactccagcctgaacaacagaacaggactctgtctcaaaacaaacaaacaaaaaaaactatactatcttcaaagaatgaggatgaattaatgaacatttgaggttctctgaactgagaaataaagcctgtttaaggggttgtggtaagattttaaaagtaatcctccaaaattgtcacctagtgagcagaatacaaaaatggagcttaagttccactacaagaccaaaactgtcacgtagagcctaagggtaagactgtattggatattagggaccacaaagcactttcatgtttacctcatttgattttcacagcaactgtgtggggagaatcatccccatttgagaactgagaacactcaggctcagcgagctggtgtcccgcttggtgtcagaatactctcaagcccaggctttccctgactgtcaacccattcctgcttctcttgtccgctagtgtgaccccccagccaagggctgccagggcctctttcactatggactttgtgttctgccattcaggcacctgcggaactcgagtcatgcaggagcttttgtgatcgtgacggaagaagccattgccaagggtatccggaggattgtggctgtcacaggtgccgaggcccagaaggtgagcaggtcaggctggtttgtggcttatctgaagaaggcaagaggagcccagtctgcgaatccatagagcaaacactgctctgcgtggctgctgcagtcagagtgaaagtacaggctgggccactccccctgccccagtgtcctacccctgagtggcagaagaaacctgccaccacacaagatctcctagctttcctatgtttagtcttttaaaatatatgtgaatcaggccggacgcagtggctcacgcctgtaatcccagcactttgggaggccgaggcgggtggatcactaggtcaagagttcgagaccagcctgaccaacatactgaaaccctgtctctactaaaaatacaaaaattagctgggtgtagtggcgcgcgtctgtaatcccagctacttgggaggctggggcaggagaatcacttgaacctgggaggcagaggttgcagtgagccgagatcgcaccactrcgttccagcttgggtgacggggcgagactccgtctccaaaaaaaaaaaaaaaaaaaaaatgtgaatctggccatctaccccctcctgtctccatgtggaggagggtaagacatagattcgctgtggcatcrgggcccccagcgctgatccatgtactcctaggggygtgcttagtctgaggccgtgcagtagaggatgggtgctctttcatgggaactggtgtgtctgacttgtgctaaagccccaggggtggccacttcctgggggaaggggctcctgattctcgagcttgatcacccctgagtctgagttgggtgcagcctttgccaatgggcctgtgagcactgtgctccttgctggggcctggggctgccagcacctactccccacagacacttttggggtgttggggtatgttgctgcaaggcctaccgccggggcttccgcagctgctcagacacaggatagtgagtctgactcagacctcctgcttggggttgacccggtgtcccctcccaggccctcaggaaagcagagagcttgaagaaatgtctstctgtcatggaagccaaagtgaaggctcagactgctccaaacaaggatgtgcagagggagatcgctgaccttggagaggtaggggcggcttccctccctccgtcctcagggcctggtgcatgaaacatgccccgtcttcaggaaatcatctgtagtcagtcaggccctggttcttggtggaatgggcctttgggctgacttctgttgtcctgtagccttgtagcagggaccccatggatcctgtccttggaccctggacattccctgctgctcccagtgctgctagcaggagagctcttcccaagcatgtatgggcactggggtggagggatttggggaatgggctaaggctggcccctgcttccaagcctgcctggtatttatttgcatttcaagctgccaggaagcttatcacaggctgttcccagcctggtaaggaccgggcctgatttgggagcccagctttctgctgctcctttctctctagccctgcttgtttcacctgccacagctgctcctaaagggactggtctcaaagctttccttgctttcctttccaggacactagtcagggaggacttgggttcgggtggggtgggctggaccctgacatcccagcaagttgtggcccagattgagatggtcgtctattggttccaggccctggccactgcagtcatcccccagtggcagaaggatgaattgcgggagactctcaaatccctaaagaaggtcatggatgacttggaccgagccagcaaagccgatgtccagaaacgagtgagtcctggcagcaccagtggccagagtgtttcctaggcaaaggctggcagaacagccaggggttcggggcctgggcttttggtctgagctgctgttctggacttttttcttgcaggtgttagagaagacgaagcagttcatcgacagcaaccccaaccagcctcttgtcatcctggagatggagagcggcgcctcagccaaggcaacccaggggccagggtcccctcccctagggctcatcagcyctctggtggctgacatgtggcctctgtggctctgagcgaagtggttgcctaagggcccacggtctgggattgagattgggaggagcagcagctccctgcatgtgggaggcatacctgggccagggtaggggcagggcccggcgctggggtcctccccacaggccctgggcacagcccctgctctgggaaggggtaggggtgggtggcaggccttctgagggctgcaaatgctcacactagtgagggtccctgctccagcaccgtggcctgagccaggtcctccccacaggccctgaatgaagccttgaagctcttcaagatgcactcccctcagacttctgccatgctcttcacggtggacaatgaggctggcaagatcacgtgcctgtgtcaagtyccccaggtcagcaccacctcgcaccagtgggaagtgttaggtcttaaggttgttggctgaggcctgtgtgtgtacagcctgcattcgaaacagcctttctgcccaccggttggttacctttgccagtaccccttacccaggccttcttattggtgaagacatctggttgatacctggctttgccactctgtcctgtcctggcagtggccatggccgccccctgtaccagccgtaaagtctgtctcggcctccagcagtatcacccagggcaaggagtgggtgatggctcctccatcctttctttccctgcattcctccctcaatcccatcttctgtgctgactcccccttcccttcctgtcttctagaatgcagccaatcggggcttaaaagccagcgagtgggtgcagcaggtgtcaggcttgatggacggtaaaggtggtggcaaggatgtgtctgcacaggccacaggcaagaacgttggctgcctgcaggaggcgctgcagctggccacttccttcgcccagctgcgcctcggggatgtaawgaactgagtggggaaggaggaggctcccactggatccatccgtccagccaagagctcttcatctgctacaagaacatttgwatcttgggacctttaaagagcccctcctaacccagcagtaactggaacacacttgggagcagtcctatgtctcagtgccccttaaatttytgccctgagccctccacgtcagtgccatcggtctagaaccactaaccccgcattgctgttgatcgtcacgctcgcatctatagataacggctctccagacctgagctttccgcgtcagcaagtaggaatcgtttttgctgcagagaataaaaggaccacgtgcaatacttaatgccgcatgatctctatccctcttcccaataggggctggctcttttgacagcctttggcgtctgtagaataaatgctgtggctcctgctggctgctgtggtgttcacctagtccagccccagaacccaaaattttgggaacagcccctagggctgcctcaaacgtctgtggaggtggaggccaaataggtggggtgacttggagcaaggcgttcataattcagtagatgaggggtggaggtagttggaagcagagaagcctttcttggagctgctctcccccctcccttccagcaagatggatggatccggctaccctgcacaactgggaccgggccgttctccctccgggcctccaggggcgctgtagtgcctcccgccgctctctcgacagcccatgcgcagccgcgcgtctttaaacaacggaagaaccagtggatgcggcagggcgttgggcggaaggggttcgcacgccaagaaccgccatgcctggggatcaccgccgcatccgcggccctgaagaatcgcagccgccgcagctgtacgcggccgacgaggaggaggcgcccggcacccgcgacccaacgcggctacggcccgtgtacgcgcgcgccgggctgctgagccaggccaagggctcggcctacctggaggcgggaggcaccaaggtgctgtgtgccgtgtcgggcccgcgacaggccgagggcggcgagcgcggcggcggcccggccggagcaggcggcgaggccccggccgcgctgcgcggtcgcctgctctgcgacttccgccgcgcacccttcgcgggccgccggcgccgcgctcccccgggcggctgcgaggagcgtgagctggcgctggcgctgcaggaggcgctggagccggctgtgcgcctgggccgctacccgcgcgcgcagctcgaggtgtcggcgctgctgctggaggacggtggctcggccctggccgccgcgctcaccgccgccgcgctcgccctggccgacgcgggcgtggagatgtacgacctggtggtgggctgcggcctcagcctcgcgccggggcccgcgcccacctggctcctggaccccacgcggctcgaggaagagcgcgccgccgccggcctcaccgtggcgctcatgcctgtgctgaatcaggtggccgggctgctgggcagcggcgagggcggcctgacagagagctgggcggaggccgtacgcctgggcctcgagggctgccagcgcctctaccccgtgctgcagcagagcctggtgcgggccgcccgccgcaggggcgccgccgcccagccctgaaccagaagcctgagcaactacggacgcaagccgaggaccgtgctgccgccgtccacgaaaagacccgcgccatcggcctccagtttgcgtcgagaattcctggaagggccctgatatgactgtggttggactgacctgactgccagatggtgggacttggtctggagcagggactacttggaatgataaaggcaaaactcaacagcccctggagctgcgcttgtggtggagctggaccctgaaattacctggaccttttttttagagacagggtttctttctgcagtctcaaactcctagccttgattgatcctcctgccttggcctcccaaagtgctgggactacaggtgcatgcaaccacacctggctaattttcttttcttctttctttcttttttttttttttttttttttgatggagtcttgttctgttgcccaggctggagtgcaatggtgcaatcttggctcactgcaacctctgcctcctgggttcaatccattctcctgcctcagcctcccaagtagctgggattacaggcacatgcctccataccgggctaatttttgtatttttagtagagatggggtttcgccatgtgggccaggctgttctcgaatgcctgacctcaggtgatccacccgccttggcctcccaaagtgctggaattacaggtgtgagccactgtgcccagctgagtaaatttcttgattgcacagaatgtacggtgatattggcggacttaaggacatcgaattgtttatcaggaataaagtattatgtgtgttttctgcggccctggataatgctgtagcattcagggtcgattgagtaaaaaaaatgtagagatggtttcctgtttgtttttgcttctagttttcattcatttgctatttattctcttctggctttgcttgtgtatgcatatatataaaaccattattattattattattatttttagtttctagtggaaggcttttatttggttctgtgaatagtcattttgtttcctaagaacttccagcaagttgtattcattccattcatctagaattcctaggctgcctttgtcgggcctgcaggtattaatggagaatagcagctttttatttttttatatttattttttgagacagagtctcactctgttgcccaggctggagtgcaatggcgcgatctcagctcactgcaacctccgcctcagaggttcaagtgattctcctgcctcagcctctggaatagctgggactacaggcacctgccaccacacccagctaactttttgtatttttagagaagatggggtttcatcatgttggccaagctggtctcaaactcctgatctcagtgatccatctgcctcagcctcccaaagttataagatttttttcctctggtttttagtaaatgttttttttgagattgcttagcaccagaatgatttgcaaatttgaaaataggaactccactaggaatgccggatagaagagtgcttcacatttgtagagggagacaagaactaaatatcacgacgtctttctgagccttttggtttgctaacgtgccccaaattcttattccaaacggtataagataattatgtgtaaatgaataccagctctacttagttttatttcatatttgtgtatctgaatatattaaaatatcttttttttttttttgatgcggagtcttgctctgttgtccagcctggagtgcagtggcatgatctcggctcactgcaacctctgcctcccaggttcaagcgattctcctgcctcagcctcctaagtagctggtattacaggagtgtgccattagcctggctaatttttgtatttttagtagagatggattttcattgtgttggccatgctggtcttgaactcctgacctcaagtgatcctcctgccttggcctcccaaagtactgtgattactatcatgagccaccacacctggcctaaaagatcattgatttagttttgagtaagattttaagtgattaaattatggtattgttgtgtctggaatatctgatattagggttttttttttttttttttacagtttttgatatgctttattttgggtatgtagtttacaaaatataaaggaaatataaggagtgttctcttttttttttaaataaaaagtgtatttttaactgggcatggtggctcactcctgtaaccccagcactgtgggaggctgaggctggtgaatcgcctgagtccaggagtttgagaccagcctgggcaacaaggtgaaaccctgtttctatcaaaaaaaaaaaaaaaaaaaaaaaaggaaaaaaaataagtcaggcatggtggtatgcacctgtagtcccagctacttgaaggctgaggcaggaggatcgcttgtgcctgggaggttgaagctacagtgagctatggtcaagctactgcactccattataggcaaccctatctcaaaaaagcaaagcaaaacaaaacatttttccccttgattatagaggtttgagaaaaatttgagggaagattcagaaaattacctgtaactgaacagaatgccaccagcttgggcttattctgcatgcataattatgaacattttcccagctcttgtgaaaattctcacattcatagaaagatagatgcaccagtaaaataaatacctgtaaatacgataataatttcataataatatgcttcacctagatttaccagttactaatattttgccagttttattttctcacacacttttgttgagcatctgaaaaccatacacatgatgacagttcaacccataatgttttagtttgcatctcccaagaataaggtttttcttctgtataacaagaatattgtaatcatacctaagaaaatgaattttattacatatgtgttctatattcaaatttctgtaattacccctaagatgtcttttaaatgatttttagcattgatagtctgtgcctgtgtagattataacattggctattgcaaaataatggttttctttttctctttttttttgagacgaaatcttgctctattgtccaagctggagggcagtggcacaatctcggctcactgcaacctccgcctcccaggttcaagcagttctcatgcttcaccctcctgagtagctgggattacaggcaggtgccactgtgctctgctaatttttatatttttagtagagacggagtttcatcgagctggccagactggtcttgaactcctgacctcaagtgatccacctgcctcgtcctcccaaagtgctggggttacaggtgtgagccactgcacccagcctaaaatgatggttttctgattctagcatttcttttataagattgctatgtaaagcacagcttttctttttttagggaaaaatgtcttttaacagctgcaaaataaatattctttcaatggaatgacaattattatttttgccatatatttattttaaaaatttatgtataatggtaacctgagcctgcatgttattcatgtgtggtgccatactgatctttaattttaatgtgaagcaagtactaatatagtaaagcataaattatataaaatttgctttatattttggattgcaaattaattgctgtactttatagaaaagtttcccaaatccgttttacttttttgtatttgaaatttaatcacaggtggaatcttaaagagagcatttagggatattgtaaacagatgttattaaggactaatgttaacaaacattgaagaagagaaaacagtatttgtttttagcttaacatcttagtggagtgaaatattttcagtatatttattttatttatttattaattatttttttttttgagatggagtctggctgtattgtccaggctggagtgcagcggtgcaatctcagctcactgcaacctctgcctcctgggttcaagcgattcttgtgtctcagcctcccgagtagttgggatttacaagtcaattttttttttaactaaaactacagaatctatttttcttggtctcatactcagttttttatgtagtcacttagtaaataacctaatttgcttgttttctccacactaattttagggtgaattcctcatttcgcttttcagatcatggggtgagggggatggttgtgtgtgtgaggaactgaggaatcagatggaaaacaatgcctctgctcctttgagtataatcagtgatatttgaggttccagggttaaatgctgcatttttatttctgacgttcgtaccttaaaatatttgaagaaaataaactatttcattgttgtcagaaatgtagttcttttattttcctgcccctctcccctttctaagtttctagaatgttgagtaggtagaacatagatgctccttttaggatcttttgctgtggaatggtccacaggtgaatggcagtaatatcttaaaatgattggccccctctctctttgtttccatcaaggatacagttgatatattagttggatggcatatagatcatactcagaaaccttcgctcacgcagcaggtatctggtaagtcttgcagcctataccagttatttaaatactgtcggggaggagcagtggtcccccagtgaccatctatcaataacatttctttaataatgcaagaaaactaattcagagaaatgttatattgtaaatgaacattacttgttagctaaatatatattttcagaagaaattactagtaggtgggtagaataagtacagacaggacttacccaagttatttgtagtttgtactggtaggaaaa

SEQ ID NO: 95565 - DNA, 59927 bp, Homo sapiens
ctgtcttcctaattttgatgacttttttgacttctggcataataaaatattcccagcttagttcatgtaattcctgccccagacccagaaccagctgtttctccaaggatttccagtttctttcagcaagaaatgttatttagagatgacaatctggatgctatatataacagtatattttttctagaagtttttttttttttttttttttttttttgagacagagtcttgctctgtatcccaggctggagtgcagtggtgcgagcttggcttgctgcaacctccacctcccgggttcaagcgattctcctgcctcagcctccagagtagctgggattacaggtgcttgccaccatgcccagctaattttttttttgtatttttagtagagatggggtttcaccgtgttagccaggatggtcttgatctcctgacctcgtgatccgcccgcctcagcctcccaaagtgctgggattataggcgtgaaccaccaagtccagccagaagttatttaatctttaattactctaagagttaaataatgaaagaatatggcccttagcacaaagtatatgaaattagcaccatgccttctaagactgcataagtaaaatattaagaacaattgtgatgctagtgattattgcttaatgatttaggagttagggttttgggagaagtattcttccagcttgaatacaattattcatcagctgcctttactttgtgctgattagtttttccctctgtgatggggtgttaagagacagaggacatagctttgctccatcaattgctagtaaggagtgaacgcatagactttcatatcctcagaggctgccatgccaaggttcaggtcaagatgatgtagacaattagaatttggtgagaggcaaaagctcttgtctaggagtctggagacttgggcttacatccttgaataccattgctgaatcatgctcacttttaaccacccttatgtgttctgaaaattggtgtctgtttcctcctctgtaaaatgggtagagtatgtttacatgagtaaattttcgggggtgtagtgtggagaagaacagttagcttatcctatctaattggattcatgagaggatcattccagacagaaataaaatatgtgcacaagttaaaatattcacagtgactgtatcttcatctcaccccaggggagtattgagtcttgttcctgtctgtaggagtcagttgttttgatgggcgcttggaatcttctcaattctcaccccattattgttcagttatggaccctcaaatgtagactaggaaaggtgacacattatgccattgttgtctaccaaaaccctggttaaaataatctcatctgtctagattgtgagtcactgagcaggactctgaatgggccgtagcatggctcctttttatgatggggaagatggctggggaagtctggaggagaccacagggccagtcaagaggcctccccactgcaagggagaaaggtgggagaaggaaatccaatggaaggtcactagtgggtatttgttgtttttattggctcatcagctatagcaccttgattttattttggagaactactcttctctctttgtgaatgtttttttttaagattcccagttaagtatcccttcagatgaaaggataaagttattatatagctgtctttcagaaattggctcctgagtggagcaacacaagacctaaagtagttgcagtccatccatctcaatggtgatgccctgaagagattgttcggtagctcctgctacctagatacgcagagatgccctgattcctggccatcctgatcctgggtctgcagcttttcttgctgtcttccagtgaatttactttttgtctctttttcccctcttttcctaccttaactagatttggtgtttgcttgcaaccaagaattctaacataaatgcactaaaaaaaccttgtttaatatcatgatttaatctttctccctctgtagcagcagagagaaatttaagatgcattactaaatgccctatctgaaggaacttgtgtctttaatacttcagttggaactttgcaggcctgtctctgatcaaactctgcaaggaattaagcggcttttatggccttctttaaaatgtgtcctagacagcttagattttactagggaaaaaaagggaatgggttggttggtttctttattgcttcctttgtctccatggtccattgtttaacttcatgctgtagtctatattctccaagaggaaggaaaacattttatttccccatttcaaaagtgatgcatgcctatgatagaaaataccaagagacaaaacaatgaaaacaaaaccacccataatcaccagataattacctcttaacattttcctgtacttacagtctttaatatgtaatatatataaagtatatgatgtatataaagtaaacatatgtaatgtttacaaatgggatcgtattgttttataaacttaaaattacttaatatttggcaatttttgcatgtcattaaattattttcagtgtgatttttaatagttgcatagcagtcttgctgtattagttactactcacatttagtaaatctaaaattttgcattctttttatgagcactcataaaaattgattagttttctgttctgaaattggtggaaatattgcccattgctatccacagcccacactgatgtccagcatatattactaatctctttgctgtagaacgaccagtgttaaatgaagtaggtgttttttttgttttgttttgtttttttgtgattcaggttataagctttgcacagaacttgtcatgctggaaaagttacagaaaaagtgaaatgaccttcagtccagsaggccttctgcaacttctatctttgataacagtctgccctaagagagagttcatgtataagccttttgttatcaatactctttaatctcatacttgtaccaagcccacaaaggtatgctaatgagagctctaacactcctggacttgactgaaaatttttctcagtaggtttcagaaagtgctgagaggtgtaagcccagcaacgtgcaaggggaaaggggacaggattctggatggccatttgcttcactgggatgcaaaacctcttttgagtactagaatcaggtaaggacagctatgttttcttggggaaggagggaaggagggctcttgaattatcctattgtctcagagatcttgaagagaccctaaagcttcaatttatctcatagctttggaaccctcttttgccaaattgttaccttttactctctccttgaaaaacagggaccccgttatgtgaagatgtggcaaacggcttgctattgtgccatgagagcctcattactgagttttcaggattattacagattaagtgtgaaccattataaaatctagaatcctttaagatataattattggcttagctctaccaaggagtgtttcattctaaaggcagggaaggcatctgctttaacattcaaattcagattttaatcaccaatgagaaataaatagtgctaacccaagttttaagttccttaaaggtggtggtcaagttagctaaagtggttcaaaaagaatgttactgtgttggcaacaattctggcagctaaacagaatgatgaaacacatgaggtagatcattcaagtccacgtaataggtggaaacactaatgttaaatcaagtgccattgttgagtggcataaaatatcatcagctcaccaacgcaaaactagaaacaaaaaagaagtattattttgtaccctctctgtttgatacacaggcttctaacacatgaccacatttacatacacaatctgcctgtccatgctctggggttgggaggtccagctgtcagtcatcttggctagtaggaaggcttagagaaccaaagccctgagcaaaaactagagatactgggtttgaagtttgctggtgaaacagctgctaatgagtagtaattatctgtagatccttagagttcagaggcatgtcttagatgtgtttcctgactcctggaaactgacaatagaagttgatcataagtcacagatctgacttgttttgctccacatttgaagttgtccctgctgctggtggttaagggcattatggtggtgataagtggatgaggaaagcttcccaataaccagaaaatttgggaagatgttccagtctctttgcccactcccagttcagcctaccctctgaagtgtctgctgttagactgatctttcacctctagcccaggaattgcaaaatcaaatgcttgcacagaccaggtagtaacttagataaataaggcctgctgggtagagattggcaggttgaagaatatatcccccatctaaagagaacaacagcactgagttttaggaaactcttggcacacgggaatgctggctcagtgtcatcatattttacgaattattttaggagataatttgaaatttcaggattgtaaatgtaaactctttataaactctgaatgctatttttttatatcttgttacctaagtcaaattgaataaaaaattgactgtactaaatacatctacattgttgccatttattaactcttgggggtagcagcatcttagccacaaatcccctattttgggggcaaatcctgggattccaataccatttcacctctcaggcttcctaaagcacaggttaagaaaatgggctctgaaggtcccacctgtgattccaatcatcctttaacactagcctcctgtaaattcccttaaaggacagggaagagcacagactctttgctactttggaatctattaaaaaatgctaccagtttgagcatttattgaacaaaagaagtactgttgcttcatctcatcttatttttataagaaatttatgagataggttttataagaactttgagataagatgatcataatcatattcctatttatagatggtgaagctgatgttcagtattgggggaggatttcccaaagtcatccagtaagtggcagaaatgaaatttgactgctggagtcagatttcaaaactaaatttttaaccaccatattatatttctttctattacattatatggggttttaacttgtatagttcctctgagtaatgattaattctccctcccttaaaacatcttaaggaatctgtaatgacatttgatacttttgtagaacataggaacattttaaattctcatcctttgatacagggtttgcaaagtgtttgggatccttctgatcactgaagggggatgttttttgtaatgcctgccttcagaccagaggtactaattcccttttccatgcccatttctcaccagatagtaattgaaagttaaaacatagagtgtaaaggccaaagttacgggtttcacctccaggtgaacaagataattctactaagtccatgaccacagagtactgtcctaaccccagccagccttctcccaaatacaagaagtatgygtgcatcagtcatccttgttaacagaggcactctcagcccagacccatgtacagatcyataaacagcatcatcgcyataaatgaaagcagtgtgatatggctgaggaatgcaaatagattttagctcagttgagctcagtggccaatgctaaatcatgaatggttgctgccaggaggagtgttgtgttgagaaagatttggaaaccacattcgagcttttcaaaaagaatgctgtaattgattggtcttgtctgccatgggcttggtctatggaatgagtggtaagtgctctgtacttgtcgttcttggtatagtctattaatatgaaagagctaagatatcttaacctcggttggcttaaagcatttgcattttaatttgtgatttcttcctcttcagtatttcttcttccatctctgctgtacctgagaagaaatggccaaacgcaccttctctaacttggagacattcctgattttcctccttgtaatgatgagtgccatcacagtggcccttctcagcctcttgtttatcaccagtgggaccattgaaaaccacaaaggcaagtgtcatgggctctcttagatgcaatttttaggcctgtatgaaacttcttgattactgtggacaccaaagagaaaaacagtgtctgctgatagttctacrtgtacttaagcagcctggaatagccgtctccctttgcattaattgcccattctgcattgatagcartttttatcaagtttacctttgtccccaatagccagctgacaggcattctgacatgtacttgtttgccattagtttttccattgatctaagcacagctcaagattygtcaaggtctagtaatggcagcttttaccatgagcctctaatctttcaatttgcctccttgtagacatcattttctcctgggggcaaaaggagaatgaaagactcactgaatgaatgtcaattagtctgtgaagagctttagagaaaggggtctcaaacgtaaatccttacaagggctaatcaagttttgcagatgaggtggagtgaggaggtkkaccaaggaggagacaggtgcaattcttgtgaagaaggcctacagcctctcccaggtggcagctgtttgttgtagagagaacacatgatctcagatctcctgagttttccagagaacctggaaattggratttttagatatctcatgattttttaaaatgttggaaacaaagtttttgagaacaacgtaggctacatttacacaaagattggcagtgggtcttggtggagcctctgttccagtcagtgttaggttacataactgttaaatgagtagagaagactggtaaagattgaagctctgaccaaagtaaagacagggctggccttaggccaaatggagaagatgatattttctacctcagttttcccttttgtagcctgtctcttttcctgcacattctctacyatgtcccagggctttgaattcctggcaaacacagaggatcagagatcctctgatccagcagtaggyrcagcagggtcatagactgatagaagtgaaaggatcattaagaattattcagttttggctgggcccggtggctcacacctataatcccagcactttgggggrccaaggtaggcagatcacctgaggtcaagagtttgagaccagcctggccaacgtggcaaaaccctgtctctgctaaaaattaaaaaaaaaaaaatagctgtttgtggtggtgcacgcctgtaatcccagctactcgggaggctgaggcaaggcaggagaatcgcttgaacccaggggtcagaggttgcagtgagctgagatcacgccactgcactccagtctgggtgacagagtgagactccatttaaaaaaaaaaaagaaaaataattattcagttttagctcttaaaattaggaaatcaggaggctgagactcagggaggttattattaattacagcaactattcttatggcagtagttactgtttattaaatggtttctatgttgagcactatagtgaggattstagaatattttctcatctaattctcacaawaatcctataagggtggatgctagtcctactgtttacattagtttcattttacgcttgggraaacggagaccctgagattgtaaataacttamccttggctatgtgttaggtttggctttagttggcatgacattcctatgctggtagcagtgaagcaatagcgaaggtgcctgctccactccttgcaatatttgatgtcttcaagaaaatctyggcttgggaatgagaagacatggatkctaactccacctagaatttggtcgaaagagcatcagatcctgagtttgaggatctggattgcataccagattcatcacatgctctccattaactattggttaagtcacttttctgactttcagttttctcatctgcaaaactgaggagattatgttaggtgatctctaagttttttgagctctgaatttccaggatttcagaaagaatcagctataaatctcttgcctaagtactttctgactacaaatkccttgtgacactgatattygatgccttggcaactcctgactattgtctgaggaagggaaataaacaaaatgatgaatatataacatktctaaataggtaaagaaaatcaaagctacatagtagccattgttctaagtttataatattagtgaacatagttattgttcaaaacagccccaggaagcaggatattattataatctccattttatagctgagaacattggggtgaaataggctaagygatttgmtcacttagtaagtggtagattcaggtttcaaacccaggcagtttgtttctgcatctgtcttcttacaaaaatcctatatgtcattctgcttcccttgatatttgtatgtgtgtgtataataaatatatatgcatacattaatatagaatatatgtgtataaatacatacacataaagatatgaatatataaatactagaataattaagatgaaattatatcaacatgtatacagtgatctaggttgcattaaaaataagtcttcagaaggtcaaagaggatcagagccaaggtagagccagtggggtggcatcctgcaggtgaggagttgagtcggatctagctgtgatggaaatggactaactctgaagcaggtggtggagtttggtagatggagaggaaaggagtgaggagtctggatagaaaaaatggaagaaaccaatccccagatattggatttagtaaacctggcacctgtttagtttagctggaaaagaagagcagggtgttgagtgaaggcagtgagtttgacaaggaatggctcgtgatgaggagttgaaggatatttgacagaggccttgattgttagtctgaaatatttctcatcctgtttaggattatgatttttaaacaggttcttgagctgttyctgtctatatatttttatgtataagaaaatatataaagagttttccttatgaacctgagcctatatattgtgttctaattgmtgttgacaaataagagggctgaaatgttgtttctcaaatctcttattctgttttagatttaggaggccattttttttcaaccacccaaagccctccagccacccagggctccacagcygcccaacgctccacagccacccagcattccacagccacccagagctccacagccactcaaacttctccagtgcctttaaccccagagtctcctctatttcagaacttcagtggctaccatattggtgttggacgagctgactgcacaggacaagtagcagatatcaatttggcaagtagacaatgggctccttaaggagactgtgaaacaagtaattttattattttacaacctgcattcatttctgattattacaacatcatcattatcttcttytagctttttaattgaccttgctgctgtctagcactatgaatttcatactagaaggaagaggaaaacttttattcaatcacaactcccctgtaaaatccattggcctttttttttcatgagcagaagtggcagagatggcaaactcaaatactacagggggtgagcaggcaccttaaatgacatcaccaggccagtgtaacataagaaatgtctagtgaatgctcagtttgggggtgggaggtagtaggaaatggtgggaactttgaggaaaaaaaaagcacaaataaagtacatgaatctagctgattgttgccatgtaagaaatgggggctcagggctgccctatcttgcagttttttaaaagaagcccccaaatccccagattaaagagttgaagattcaaatctcttacttaaaaaataaaggcaactctagctaaaactggaaacctaggttggactaatactgtgaaagcaaataaaacttctatgtgtcaggtatggccctattgactgctagtcttggctatgtgatggaaatacccatttatgtcagtgcttcrctaggaaaccagagcatgaagttgtctgatgggattcactccctccytccaagtaatctttactttccagatatgattcttgactgtgtgttctgaaaagtgatcctggaatgtgaaccctaaataaacactcccaggaggggtaatgcaaacagtagagggggcattctaaagacctgggtgtagttttatgggtaaattttatgacatggtgagagaagtggcttgggataggtgtatgtgatctgatttggtttaaggagttgtagagtcctgataagtcaggagtcccagggttggggagaacaattgttctgagagatggctaatcatggacagcctgctgccacaacatcttgttcccaaatacctcactctgcatgtagccccagcagcacaacgtcgttctgcatatgtcccgctccagcgtgaccctataaaatttccctccagctcctgcttctttgcagacagccccttctctgctgtgctgcctgttgagcccttgcaacatattttcatactttgcctaataaatctgcctttctttacctatgattgtcttggtaaatttctttaccaccccatgtcatgggcagtaaaggaatttaccagcctgttgcacccacgacaggaatgatactatggtaaaagccagggcgaggtaccctctgtgaagaatacttaattataaatataccactttcttcagaaaacaaaatcatacactaaacaacaaacatgggaaagccttcaacctttaaaatgttcctgggcaatgtgggatggaggtagaggaaatattttttcctgtagtaccttagaaggcaggagaagaagagccattgccaaaaccagaaaggccagaaagatctctcgtgttagtgttagtaacagaatttccaaagcctcaccagctccctcctgcccataagccagggaacagcttctgccaacctgatcgattctttgcctttgcatttttctacacagaggattcaagcctcttttatgatattttttggctttctttgttcctttttctttttaatttttgaaacatatatcctctcactcagagccaccatgtcatgtggatgtttttctttgtttttctgcagtcgtctatattgtatgtttgtgcctggtttctagtagcaggggaatgagacagagcagctctgattgtctcttcctctttagatgggctatggcaaatccggccagaatgcacagggcatcctcaccaggctatacagtcgtgccttcatcatggcagaacctgatgggtccaatcgaacagtgtttgtcagcatcgacataggcatggtatcmcaaaggctcaggctggaggtaagtgatttgagaggagaaatgaatgaagaaatgatatggtttaaggaaaagtgggtgaatgtgacaggaaataattcctcttggtttctcattcagtgaaattctaytaccttcaatattatacgctctggacaatatagcagataatcttacaaggaraatgatcttcactatttcagtctaagttatcttggtcaaaatttgctttcacttctgctgatgactcatcatcattattaatgctaatgtttttgttgaaagcttataatgtgccaggtgacttttatatatatattcccttatttaatcctccttgttagaagttgggagagcacccattaatcactaagcacttcttcaagttctcagacaattgagaatacatgtgaggaatcggatgcgaattaaaacgcaacattgaaatgaggttgaccgtgaattggtagttatagaagctgggtaataggcacatagggattcattatagcattctgattatttttgtacaaatttgaaattgtcacatccatacaaaaggaggaggaggagacggagagagagagagagatagaaagcgagcaagcaaccaaccaagccagtgaacgataaacttccagttctaactttctaaggcaatttctaagccctgayccagtactattttctgcatggaatcaggtcactaagagagaatgtgttctgttaatgtctgctaacattcatgaatgtgagaaagaagagcggctggagcattkaccagaacaatgatcataaatgtccatcatgcaatgtcaggttctactagtctaacctattaaacactttcctcctgctgtgtgaaggggccagtgagagggataatgagatggcctaaaagcatcactttaacattgctccctcttggggaggagagcggaagcctccctcatcacatgtgggaagcatccccacatgaggaaaaagggattaagtgttttccccmcttctgcacthacaaaacagtgaggtggctttgttggtatttccattttctgtataagaaaactgagtcttagagaaggtaggtaactttccaaatttcacacagttagcaaatggtagagctggattctgaacacaggtatggttaatcccagagtccacattcttttttttaattttttattatactttaagttctggggtacatgtgcagaacgtggagttttgttacatagctatacatgtgccatggtggtttgctggacccatcaacccgtcatctacattaggtgtttctcctaatgctatccctcccctagccctccacccaccgacaggccccagtgtgtgatgttctccctgtgtccatgtgttctcattgttcaactcccacttaagagtgagaacatgtggtgtttgattttctgttcttgtgttagtttgctgagaatgatggtttccagctttatccatgtccctgcgaaggacatgaactcacccttttttatggctgtatagtattccatggtgtatatgtgccacattttctttatctagtctatcatggatggacatttgggttggatccaagtctttgctattgtgaatagtgccacaataaacatatgtgtgcaagtgtctttatagcagatacattcttaaaagtgacattattctatactcttagaaggaaaaatgcattgaccacttgctttttgtaaggtactttgctagtgtcacttcaggggacacacaactaaatatgtcacaattcatctcccttatgaggtcattttctaggtggtggatagaaggaaggactatgaaatatagagatacacagaaatatacagttagctataattaaccaaaggaaggtacagtgggatagtaattgtctattactgagtaggaaattaccccaaactatagtggcttaaaacaacaaacacttatgatttcacatgatctatgggtcaggaattctgtcttggttaggtggctctggtttaggttctatggcaatcaaggtgatggcaaaggttgagtcatctgaaagcttgacccaggcttgaaggtccacttccaagatggtttgttcatgtggctgttggccaaaggcctcagttcctcactcttcctatccttacgacacagcagctagattccctcagagtgagtgacccaagagaatgagcaaggaggaagctacagtgcattgtatgacccaggtttagaagttatacaccgttactttcaccctgttctattcatcaagcaagtcactaagtccagctcacactcagtggtgaaaaagtaagctttacttcttgaagggcaaaatatctgagactttgtggacatatggtcttttaagatcaccaatagggattcaggaatgcaaattaggaaaacattttcatggtggaaatgacacttgagtgagcagaattttaaatggttaggatgggaaggcagagaaatctgatggaagaaacagaatgaacacagagaggcacaaaggagggatgtagactctttcatgagggaacagaggagatctattaggacatatggaggcatgtagttggagatgtatctggaagatatgtttatcataattgcagagggccttgagatgccagcttgtttttaattctgtgggtgatatggactctgagaaatcttctgagtggcggagtgatgtaaacaccattttgttttaggatgattaagcaggtagrgatgtttgatatggattggaatagagtggaactagaagtgaggacaaaaattagcagattctttaaagwgatactgaggctttattggtgagggtccagttaagaaaacagtaatcatcatactaggtatttcaaacagagggatttcacccaggggagttttacaagatgttaaaaggctgaaggaacaagaaagggaagctggagttgctggaagggtttttattttttgtaactttgcctaacaatttccccctttatcacgtgagactggcacaaagatcttaaaccaatgtgatggcagtgagactacgtggtggtgggataggaaattaaatgtgagtcagccgggtgtggtggctcacgtctgtaatcccagcactttgggaagctgaggcaggtggatcacttgaggtcaggagttcgagaccaacctggcaaacatggtgaaaccctgtctctactaaaaatacaaaaatcagttgcatgctggmaggwgcctgtagtcccagccacttgggagaccaaggcaggagaatggcttgaacctgggaggtggaggtttcagtgagccaagatcactccactgcactccagcataggtgacagagtgagactctgactcaaaaaaaaaaaaaaaaaaattaaatgtgagatttggagatgaatagacataaaagccagtacttaacataatattcatgctgagtctggaactcttgtcagtgccttgtatggattaatgtacttattcctccaaacgactctatgagggaggtattattattatgtcatttgacagattgagaaaccaagtttgcagagggccaagtaacttatccaaggttgcacagctaggaactgtcagagttrggattcaaacttaagtgttttggtgtcagaattcatgctcatttctactatactatactgcttttctgaaaaatgasatggctctaattgggaaatagtayggtcattagcagaaataaaagaaccaaaaggtagactttggcgggtagagtggggaggagtttaatgtgttgttttgtaggtgttatcaagtcaatagtgggcaccatttttctatctcttcctatttttacatctccgtgcaatctgagacccagtgggaaggctgttaaatgaacccacttagttttcccaaattaacccaaaggaaggtgtgaaaaataaatgtagctaaataagtgtcattaatattatttataacacctgcttctatgtaggttctcagtgtcagctttaagataggtgaaatttccagcacagaatgaagattatggaagatctctgtgcagtgaggcatgacagaaaaacagaaggactttctaggtttttctgtgtcatgctcccaagagtgtcagtgagacgaaatggaatagaaactgaagacagaagtgagcggtagacataaatgtagctgctttgtcctgtgttaaaataccctcctttcatgaactgggaaacacgttatttttaatggttatcttcctggcattgttatatgactaggttttatgtatttcttttttctccccgctagaagtcccatatgtctggcttcatatcagagactgtagtttaaaataaaattcctgtgtaccgtttgtagtctttcttgttttaaaattcaagattcataatttctgtcttcttaagggcttgattcttgagtagacatgaagaaatgcatttaattctaaagccctaatgtcacagttctttaggaataaataggatggggttagggagctttaaagttgactcgtggctctttttctctactaccttcctgtcttagctgcaaattgttaagaacatcagcttctgactttagttcagctttcatgatgtcccttcattgatcattttctcttctctttatacatttcttcttcatgagtgtggtagttacattatggaataatatgcgagagtggtgggggattggggctggagttaggaccaaagagaaggaatacagaaggatgttagtcttgttatattatacttccattctgtatttgtcttgcatcatagaattgcttatgtggacatggtaaccaaacaatcagtctttgggacaaggagaggttaatgaggcaaggtggttatgactggaatgagaatggtgtagatcttcacctgcaatagaagaggttgaatgattatcttcatgtatatcaagtacatagcatagaagctgctactccccacttaccagcagtgagctggaactagcttgcacaagctcataagaaccaatttgtaaatattcagaaacattgtgagctggctgttaagcttttggtagcttgaaattgatcatgatgaggagtttttacatcacagaaattggtgaacaatacaaatgagggcttttaattttattgtrtgttccagagagacagcttatcagagtgtctatgccatactcaaggtaaacattgctaacaattgctttgggtttgacacttttgctggatttttttttctttgattaatgtttgtgtgtacatggtacatatagttatggggtacatgagatgttttgatacaggcatgcaatgcctaatagttacatcatggaaaatggggtacccatcccttcaagcatttatcctttrtgttacatactgctgggtcattttttaattatctttcacaaaaaagacacaatgataccaaactttagattgcagcttattaaagcataatcagcaacaratactcagcaacatcaccagtattctstctggtgttttcttgatgtgtatgcaccatatgaagacattagtcatgcatttggatgttcattgatcaactcattcactaaacatttactgagtctctttgtattagttgtctattgctgtacaacaaatcgcctaaaaatttagtggcttaaaacaacaataataaatgttgttcaaggcttctgtgtgtcaggattcccagagtggcttggttagacgattctgacttgttttagaacaagtcatatrtaatcacttctgtgtcatgatgtggcactcagatgctggctagggccgcagttktctgatggcttgaccaaggtggaagaaattacttctaaggttgctcactcagatggctagcaagttagtgctgacaggatgcttcctatccacttaggcttctccacaggattattagggtgtccttgcatcacagtggatggcatcctctagaccaacaagtctaagagttcgtttcaaggcacactgaattcttcatttgggaaatgaggtactagagtagcttaaaacctttgcagtttctgctcactatgcctgagttgcttttcccccagatattgcacagccgacttgctttcttcatctmagcctctgctaaaagagagcccctcattagaagatctttcctcactaacacccactactttctttttccttatgcaacaatgtttttcttcatagcatctatcactctatgatataatatttaatatttatttgcttgcttactgtctttgtctttcattagaaaaaaaatatcttcaagacargaacctcatatattcttttgcttagagcacctgttgaatgatgaatgaataagagtactggttctctagttagacgagggtctggagtctggctctgctacttattagatcaacaggcaaattatttaacttttgtataattcaatgttctcagctaaaaatgggcttaacaatacytgtgtagctcttgaaattgtaataaagatttttaaatacataatatatataacatacctagcattgtgtttgcttatagtaagaatctataaaatgttaggtattgttattattattttgttgttattactatgataatatcctcaaacatacagtgaggggccatttgaaagaggtgttaatatagtttgtctgtgtctccgcccaaatctcatcttgagttttagttaccataatccccatgtgtcgtgggagggaccccatgggaggtaattgaatcatgagggtgggtacccccatgctgctgttctcatgatagtgagttctcacaagatctgatggttttataaggggctttcccccctttcactctgcacttctccctcctgccatcatgtgaagraggacatatttgcttccccttctgccatgattataagtttcctgaggcctccccagtcatgctgaactgtgagtcaattaaacctctttccattataaattactcagtcttaggtatrtctttattagcagcatgagaatggactaatacagatgttattggtatggatcagtgattgaactcatcaaagccttttctcatgttgagctcctatgttatccctcttcttagttcaattactttttttcttgaaggtcctgaacagactgcagagtaaatatggctccctgtacagaagagataatgtcatcctgagtggcactcacactcattcaggtcctgcaggatatttccagtataccgtgtttgtaattgccagtgaaggatttagcaatcaaacttttcagcacatggtcactggtatcttgaaggtaggcaaagagccccagaggcagctgttctttaccattgcttacaggtattttaggagtgattggatgtgatataaagaatccctataggatttgggtctgagcatagtattagcatgtacaattctttctcctccctgactctatcttagcttcttgttctgagctatgggctgttagggatgaggcatggatgattggaaaagaaggcttctatgggactaagcccaatgtagttatttaaacagacagaaaacattttggtttggggttctttatagagggcactacatggcctgttctttgcacaaagtcacacaaagagaaacccatgaaggagccaaaagtaattacaaataattctaaaattttaaaatatttcccaaagtacaaagagaatccaacttataaacacacatcccaatttttcaagttctctagtatagatacagacctccgtggtgctcctgacaaatacccttaaactcctctcctgtttctggtttcagtagcttatactcctctcttttctgtctttcagcttattattttgttgcataggatccttgctaatgttttgcttcattttattgtattccaggcttattctctattttttcttacaatgtcacccccaaaattcagagatccagctggcataggcagaaattgctttacattgatgttttgcaaactgaggcttkcaatgtattaaaggcttatgaaatcaatttcatggattgcaaaaaacattacataaaaaatgctaaaaaatagattgtaagatatagtgtatgacacacagtcaggrtatagtttgctttgtggacttttgttttgggatgcatatgttgatgtgtattaagttatgwtgaaaaatgtatctctcactgtagttcactgtcaaaaaagtttgaacaactctgccttggtggtagaatggcaagggtagggaggtggaaacagttgcatgttagcaaaacttgtwttagtgttgtaggagtcaagtctcccattttggctatctgaagtracaaactgaacctcatttagcagtcctgagagagcaggagttgagactttttgtgagctcaggcattaatcagtactgtgcttccgtataacayggcatttcccttatctcaaccttgaaagccatttctgtttacctccagattgtcaacagcgatgtggttctcyagcttttatcccgtaatgtggacccattagagacaaaggaaattgttcacagggctcttctgtttatattgactaagttattgtccccaccaggatttctaagcttataacatccccctcttttttaaccttcagagcattgacatagcacacacaaatatgaaaccaggcaaaatcttcatcaataaaggaaatgtggatggtgtgcagatcaacagaagtccgtattcttaccttcaaaatccgcagtcagagagagcaaggtgaggaggaatcgtcaaaatgaaatcgtttcattccctttagggaacagcaacaaaatctaagtacagggctgttacttgatgaatatggtgaggtcccaagagagtattacagctatgatatcttaaaaacatctgtrtaatctaaaacaagcagaaacaaaaagtgaatgtagaaacaaacaccaatttattaatgtrtctttccactttgytgattatgggagcgagtgtggatgtttgaaggactctgggctttgaaatcaggaacaactgtggtctcagcttagttttattgctttctagcaatgtgacctttagtgatttacttatcttaatttattgtctctcagcttcttcatcagtaaaatgaagataaaaatgtgctcaatgcatatttattaaattaatgaatagctcttttattatgtgttatccagaataaatcatcttagtccacaagagtgtggcaagacagagaaaataaaaggataaagaatatggacagaagagtaagaaataaacccacatatttgaatggaaaaactaagggagaggattattttgcctttttgtctttttttaagtgatgaaccaggtttgtaacagaagagaagtgcttggttactgtaacactgtaaaataataccacagtttccacttgaccacttgacatttaacatttttctgcatatttttcaatagctttcaaaggagatgatttttagaaaatgtaatctgatttcccttgrgaagacataaaagaacacttaagttgcaggtcttgaatgcttttgattttgcaaattccctgctcttttaaagagatttcattaaaaattgatatgagtagaaatttcaaagacaaataaatcccttttgtaagaaatacatatatgttatataatattgtatgttatataaaaatatgtgtatttcagctccagtcgcttgacctagtcccccaaactttgatcgcaattgcatagcctttccttagctgataaatgaggtactggatacagttcacagaactactgcttgtcaagacatctcacttactgagaggcatttttgtttttgtgtcagctgctactgttcatcttacatgagggttaggctctaacacagaactgactgtgcttttctgttttactgactaggtattcttcaaatacagacaaggaaatgatagttttgaaaatggtagatttgaatggagatgacttgggccttatcaggtactgtatttcctttttaaaaataattctgtcgggtagcttttcttaattaaagagaagggaaaagagactagaatagtaccagcacacactgagaataagttgtgtggttaagagtccaggttctgaagtcagacacaactggggtccagccaagggccttgtacagggttctcagtctctcagggcttagttctgcacttacaaaacagatttaatacagggaagataaatgagagatcttggtgaagagcttggcacagcatctcgcatatgatacaaaaattcagtaaacattaacacttattatgttatcaagatctcacatgtggaacttccatgatgrtatacagttatctcctartaaaatgaaaaaacaatctaaccaaccaggaaagtgattatggctttgagattatttacctgtgtttccctaaaaggattaagtccaatgcaggacaatggcaagtagggataaaatagaactgagaacacctaaaggaagcaagtgagggaaaattacaggtggggccagcttttagcacaattatctgggagtgacagcatttaggaaaacacatggattttgttttcttgaaaataaggaatttgcattcatatgtgattttggttactgcaactggcctgactcaggaattgactgggtgggtaacatggttccagactctttgacctatggacttgcaaatgatgcagacatgccctagggaagtaccagatagtgctgggtgctacagtcaaatggcttgggttcactctgggctcttgtccttattagcaatgtgactttagacaagttctgtgactaccctgtcttcctgtttctcatccctaagcatttttgtgcataccataggataaagtaagtatttaaaatgttgataataatgattagaaagatgacaaagggtctgccaagtagaattataaaatatctaagtaaaagatgctatgtgaataaaacttgcagtaaaattgacaaagtggtgaagaaaaacattaaaaactatgattcacagttcacacaccacagttggccctaaaactaggtggagaacaacatggtaataaaaagttcaggtcttgaggtaaggttgacttggcttcaagwcccagccctctgccacttactaaccctgtggcctggagaaagtaacttaattcacttagaccttaactatcctatttgaaaatgggaatagtaataccccatagggttgtctgaggattaaatgagataatgcatacaaaactctagttctgtgcctgacatagaaaaaagcttaatcattttagctaaaaaggaatagaaaacatattctacctcttctgaataattccattaccagcatattagaatgcttgaaattcttagcatttgagttcctcttttgtgttaaaagtgaagtcactaaaaactccctaataaactttgstatatgggctgacataatggacttattcttctactacaatcaacttatctcttgattagtttccccttagcatttaactcagcacrctttctaaatgtcaggcatgtaactgtgtgagtggggtatgttatgatgaatraggcaagttttctatctttaagggtctcacaagctggtggggtgattggggcaagagacagagacaaatatatagacaagtaaccataacatgaatcagatgaccagcagtgctatcccatgggcataaataatgctgtgggagtttggaggaggtagccctgagtttttcctgagagcactgtggaaggcttccaagagaaaatgacatttgagttggaccttcaaggagtcatgggatttctcacggagtcatgaaaaatacagagccataaggccagagtgtgggtgaggtcagggcattggtaaaaggtggactggaaaggtaaaacaggtccagattctagagcactttagtggggcattcaattacaagaagggcaggataacagcatacatctctgctagttacactgagtatcccaaatttgttgggacaaggagatagagtcgcccttatagtttctatttwactcttggctgaaggaccaagaccatttacaattcccttttagtagtttttgaacctttttttttttttttttcctgagacaagcttttgctctgctgcctaggctggagagcaatggcgtgatcatagctcactgctgcctcaaattcctaggctcaagtgatcctcctgcctcagcctccttagtaactgggactacaggtgctcaccaccacacctggctattttttaaaattttttgtagaaatggggtcttgcttgttgcccagactgatctcaaactcctggtctcaagtgatcctccacctcggccttccaaagtgcttggattacaggtgtgagctactgcacctggccagtttttgaatcatttaataactggaacagaaaattcaaaaatactattattttggccagatgttctttgcttccatacatgcaattgtatcatgtatctggaagtctttcggtcaactgtcaaggttatagcaaagcttttccatctgttgtgcttaacatcctgcaataactttccattgtttctgagctgccgtatgttatctttgatgtaattgctcctgcaattgcctcttgttgcatagtgtaattgctctttgaatacgttaaaaatgatccaaaatataaagtcaaatgtgggctgctaagtaactcacccaccatatgtagatgcctgctgttagacagaatcccaaggtgtgaggagtttggaagcacagcaactcagaatcacagagcatggagatgaccyagtttaaccttcagcagaggaacaagggcctagaaaggtgatgtgacctgcccagcatcacagccaagactatcttcttcacaatgaaaaccatatttgagttcataattcattccttcttactctcatttttgttttcagtttttcattcagcaagtctgcactagggacctactatgagccacgcaatacttccttggaatgatgtattccctggccttgaaataaggaatctagtacccatgtttgtgctactggaatgaatccattaaactctctgagactcagttgccgtattttcaaatgtggctatcatatcttctctccacacagagattattatgggatacactgatgaacaaatatagatggagttgctgcccttataggacttcwgtctactgagggagacagaaggcatacagataggcatacaatacatgtaaaattataattgggctcagtgctaagaaaggcaggtgtgtagaactttcttaaaggaatttgaccttgtcagagagattgggaaaggtttccctgaggaagtgacagcaatgggagctggaaactggagtaggaattaactggcaaaatggggggattggaaaagaacatttaacacaaatggggaagcatttgaagaactggtaaaaggtgagtgtggctggagtgcagaggtcaacagggcagggtgttgcaagacaaagtaagaaatagagattagatggcatgacaaagaatttgtttttctataccaagaggaatgaaaactcattaaagtgtytcaaacttgggttgggagttggggctgtcgaaggattgggaagagtgtagacttgaggaatgaaataaaattatgttcctgaaactattccatgaaccattaagccctctacaattgtgaagccaccatttgctctagttgctctatgtcagaaaaatctgttagaaaattctatgtcagaaaaatattgctatctttgtgcctttttccccttacatgaaagcattcaatgtttttttttctccagacatggagaacatgttgtggatgttctgaattgtgaattaaaatataagctgtgtaacatttacaaaattcactttgggagactctgtaaggtacttcaaagagtctgtcatccaatagaggaaaataaacagaaccttgagagtctcggatgcaataagacactatgtgtgtgaagaaaacatgaagggagaaagcaaaacaggtttcaaatgtctacatcaaaaagaaagtcacaagtgcagataatctgagtggtagttgtggtcagtggaagagctactactcacatagctacacttacgaaggcagctctgagacaggtgaggaggccgacttatttcttcaaggatgctgcaactgaaaaggctttgtcttgcttttcttctctttgccttcctcttttcttccrccaagttttcttccttgaatttgcagcagtcacatggactcctcttctccttccttctccttctccttcctcttcttttcttcttcctcctccttgctcctcatcccgmttctcctcctcctcctcttcttcctcccctctyttctcttctcctctcctctccactgccttctatttatgtattgcaaacccttttattcttatagtcagtggtcttgtaagggagccctttaaaggcatatttttaagatgacaggggcagtgatttgtgtaagctatttgaatcatttgtgtaaaaagttaaaaaaatcctatttgtgctattacactcatttattcaaatggtgttgacttacagaactcagttgcagtatatatataaatcttctctatcatctatgactatgacttctttatttaaaaactttttttacataaaactgttttgtttttaattgacacagaataattgaattatttttcttgaattgtaatgtctgactgtttattctctatggttttctgtattctgactctatactctcccctccgtccacttaaccccactcaaattgcaaatgctgaaaccttagtgactgccctctaccaaaccattcttgttctctttttttcatctcatcttgtctttgtcttcctaaatgccttctctatcattagcatgaattctgatttataaagccttcctttctgtttattttatttattgcttttatttaaaaaataaatagagacagggtcttgctatgttgcttagactggtgttgaactcctggcctcaagggatcctcccaccttgacctttcagagtgttgggatcacaggcctgagccactgtgcttggcccctgctttctttttctatatctttcactgaacctctttttcttgttccgctccatgttgtgaagcttgatgctgtcttcctgctctaactttactttctgtttgcctgtattcttcttcagtggagcttggtcatggttgtgaagtgagctttcatcctgggtcaggttcacccctctcccctgccccgtaggtgaaggtgcctaaaagggcttttagatgaccaagatggtgactgttgactgataacaaagattgatcagcctagtgtagtttaaattgtcccaagtttagaaaccaaagccataaaaaaatagttggctggagatattggacaacttgattgttagatttctggaaagttcttacttaacctgaaaaaaatctgggagattattwtttttttctaagttttttttcagtataaaaatagtgtgtgcttaccatagaaaacttgaaaaataaagaaagtagaaaggaaggaaaaattaaattaaaattatactacctcgaatcaatcatggttaatattcaggtgcatttgcttctgttcatttttctatgtggaacatataataagaaatacacatgactaaaagctcattctgtaaacgtgaatgctcacttggtttcactcactgtgcactagaagctttaaaatactataaaaatattaacaatgttatctccatgtactgagaccatcaagtatctgtttgtttttgcagtgatcctcttcttatctaataatgtgttttttttgtcttaaagtctacatagtctgttaatgtggctaacccagaatttgccatgtatatttttctatcattttctttgaaccgttctttattcttacattttaagggtgtctcttatgaatatcatatagctttagttatttcttttgtactctgacaatcattgttttttaartgaatttagtgtattttcaggaattgtgattattatatctgaacttttctgtatctcctcactttgtgctatttgtctcaccttttcagtgcttctttttcctcctttctcatctcttactttttttggattgatagctatttttaaaatatatatttaaatggcagattgtagtttataaaaatggctgcaacaacacaacaattgctcttattccatgttttatccaaagtgaccttgccactctccattaaaaggtggagattattttcctagttcttgaactttggctggtcctgtgactgctttgaacaatagaacaatgcagaaatgataccgtgccagtgctgggcatagtttttttttcaatagactttattattatttaattaataaactatatttttaaaagcagtttcaggtttacagcaaaattgagcaggaagtacagagatttcctatatgcaccttcttccaatacatgcacagcctccctcactatcaatatccccaaccagagtagtacattccttataactgatgaacctacattgacacatcatcatcacccatagtttaccttagggttcattcttggtgttgtatcaagtaatttttaaaatcttcttttcttttatatattttctaaaatttccacagtaagaaaaaaattaaaaagtcaaaaaatcgtgtggagatcctgacactcagagccagcttctattaaaagtttgttacatagtctttcagactttttctaagmacatttataatatttttcttaaaaagtgggattttattatatttacagtttgttaactctatttttaatttagcaataccttatgaatatctttcaatgccagttagtattttttaaatcaccatttaaaaattgccatgtagtattccattctatgtatcataatgtactcaactaatcagcaatcatttgttatttagattgtttacagtgttttccatcataaaatacatcgtgataaacatttttttttttttagatggagtcttgctctgttgcccaggctggagtgcagtggtgcaatcttggctcactgcaacctccacctcctgggttcaagcgattctcttgcctcagcctcctgagtagctgggattacaggtgygcactaccacaccyggctaatttttgtagttttttagtagagacggggtttcaccatgttggccaggctagtctcaaactcctgacctcaggtgayctgcccgcctcggcctcccaaagtrttgagattacaattgtgagccaccacatccggcctatgataagcattcttgaacagatacatatttgccaatgatttccttaagctaaattcctagaatgggattcctgagccaaagagaatgtttatattttaaagcttttcctataaattgcccaacacccctttgttggtttactctcccattactcaaacttgagcagaatgttgtttgtcatactcttgccaatcttagtatkaccatgctttacaattgttgccaagtaacaggcttaaaaaagtcaaatcactgttgttttcctttgaatttcttcaattcacggtttggctcaaataaaaaaacaatagtctattggccatttcctgtttcttgttgcacttaccatgtaatgtgcaaggattttttaattttttaatttttattktttgacagagtctcgccctgtcgcccagcctggagtacagtggcgtgatctcagctcactgcaacctctgcctcctgggggttcaagtgattctcctgcctcagcctccccagtagctgggattacagctgtgcgctgtcattcccggctaatttttatatttttagtagagatggggttttgccatgttggccaggctggtttcaaactcctgccttggcctcccaaagtgctgggactaaaggcrtggtgcaaggattttgactgctgtaacttaatggaatttaccctaatgagatatttctccaatattgttatttagaaggtctttttcattcaggatttttgaagataacaaaaggattccttgagaacgtacatcacttctctggggtggagttggtagaaatattctgcaggatgcttgtcccaggtgtgcctgtaactttaggagggctcttctggctagagctcattatctttttaaaatctgagcagtccggtgtgtattcttttcttctgctggtttaaaatttagcttgccttttaggtaaaagtctgggcccaataatccttccagtataagacaatgaaacaccctttcctcttcttctccaaacagtttgcagtgggttggggtgaggatgattktgagggagtgaaaacgagggtgtgaaggtaattaatggcaagtgccacacaagatagaatgtgaaattccagtggcttaacacattgaagacttattttccactcatggaaagtctagtgaagattgggtagtccttctgcacacatgttattagtcagaggtattcacacgccccaccttgcaaatgagactgggaaatagaagagcacatgggcattttgtgagcactcacgtctctgtcacaagagggcaggctatcctcactgaatcatttcatgcccataccatgtgggttgaatatacatgtgttgcgaatgttgaacaccgcccccatatatttaacattgtattaatcttacraatcatatatatatttgtatatatatatatttatttatgctcagagctttgtatctctttcctttatcatcattatcatcatctgcagctgcagcagcagtagtatcagtatagcatcaccaatattcttgtagtgaacatttattccattcttggtatcagccagtctttgtgctaagcacctcacatgtattagttattttaattgtcaaatgcaggtactactattatcattatgttacaggtatgaacactgaggttcaaataaattaagtaactcatgtctgaccccagagctggtattttcagctactgtaacacaatattagcctctgtattagtttcctagggaagccacacattatcaaagactaggtggcttaaaacaacagaaatttattctctcacaggtcaggaggccagaagtccaaattcaaggcattagcagggttggttccttctggaggctctaaggggggaatctgttccatgcatstcttttagcttctagtggttgccatcaatccttggcttcattggcttgtagacacatccctccaatctgtgcccccatcttcatatcaccttgttctctatgtctctgggtttctctctgttcctttcctcttgtaacgatgctagtcattggatttagagcctacatgcggtcagtataatatcacttaatctttaccttgattacatctataaaacccrtatttgcaagtaagtcacattctgaggttccagatgagcatgcatttttgagtgacactattcaacccattacagcctcctatattttatttcctaaagagctcccatgttgctatgaatcttcatgaacgtacctttgaatggatacacagtattctatttccctatttgtgggcgtttaggtcggggagggccatgctagcacgtagaacctttgtctaagttacacaaacgcatcctcttttctgggctggctgaagtgccaggctcagtgagctgcacagaggctggatttaaccacctacttaccccctttgccagtgttctttgtacagggcacagcttgcacactggacatggaggcccaggtctgagtgcatggaatctgcttttacctttgtttcagagtagggcacatgcaatrtctgaatcactagagatctttttctccaaatgcctcctttacacagaaggaaaaaaaaattgtagtgttttatattaatatgttgtttactgattctataatasttgaaatctattatttttcagtctcaataatttttaaattttagtccagaaattttgactaattttgctacaaactaggataaggtccccaatctcytgactttctgctgtatttttaattacatcatgctgattcamgtagcaccttgcttcctattttacatttagctgtgacataagcattatttaaaaatgcttattattagagatgtattcatccttttatgtctgaattcttaacttctgaaactaaagctttcttcctttcttttgaactttgcttggaaaaatattttttggccagataaaataaaatataagtactgygttttaaaattaaaatgatcacctttctgcatatctttataaatattcatccataactatagtactttggttgctgtgacaagtttgctattttaatagtgcacatttcaaaggacaatggaggaaaaatatgacatcttcctttccttcaatttaaataacttttttctgaacacttattttattttaattttctagagaaaaagttcagtttattttctgaggcttaaaataaatggaataaagaagaaatcaagccaggtgtggtggctcatgcctgtaaaagcagtactttaggaaggtgaggcaggaggatcgcttgagctctggagttggagatcagcctgggcaacatagtgagaccccatctctacaaaaaataaaaagaattaacttggcatggtggtgcacatctgtagtgccagctacttgggcggctgaagtaggaggaccacttgagtctaggaggtcaaggctgaagtgagccatgattgcaccactgcactccagcctgggcaacagagtgagacactttttcaaaagaagaagaaatcaagtctatatctaactagtagagtgaaattcttagtacatgctttctccatagttaccattgtggccaattgtgcaaggtccttgatggtaggaaatgcatctgattcctctttacgatccttcacacaatgccaatcaacatgattcccaataaattcactctgattgaatgaatgatacagctgccatctttccttgtccatatccattctgctctggccgccctgactatccattctctgaacacagggccctccttcatatctccatgcctttgcagatgttatttcctctgctaggagtactcgttatctagtgattcctttgcgtagctcttcctcatcttttaagacctagctcaagtgtcacttcttttgtgaagcatgtctcaaggccaagatgatacctcatttatctttatgttcctggtggctggcacagagtcaaagttaaccaaatgtgtagtgaatgagcaagtgaatgaagagaagggacagaaccaggattccacagtggataagagcatatatctctatctstatctgtatctatctatctatctatctatctatctatctatccatccatctatctatctatctatcatctatctatctatacacacacacacacacacacacacacacacayacaacctgaattcattgctctgcttcttgacttaccattgtgtgacctaggtcaggtaacgttaccactctgggacttagttttcttagttgcagaatgaagataatgatagtacttgactcaaagggttccctgtgagaataaaatgagatcttgtacataaagtcctttgtctaataagagctaaataatgtcagcagaatagttctatggtttttctttgattgtaatggaaatattcagtgttggctgaagctggctgacctcagtgtgatggtatcagatggaaatgttttggttgggaagccaaaatgctaccaccacattttcttccaaactaaagaaactccaaaaaagcaaaatccatgtaactggaaaacactagttgattagaatttcctgatacttgagttctaagagaaagagacaaaaccacacacacaaacctaatagaagaatattcctaaatgtaaacaccttgcaaataactgcgaggggatgactcytaraatatcttcagcccaataaatgtttattccttagcacaggggcaaatarccatgtcagggactgaattcagctcactcattggtgatttggcttgacattgtgttttgaaaaattcaaaatggatgccaacatgaaaaaagaaactacatagaaattttcgaatgcctacagtgattaatgtaatgaatctccatataacttattgcccagattcaataattagcaagactctgtcattctgttttatccttcccctcactttttttttttttttttttttggctagagtatttgaaagcaaataccaggacattatatacttcttttttaaaaacttaacttttattttaagttcaggagtacatttgcgggttggttacataggtaaatgtgtgtcatggggcttcattgtacagattatttcatcgcccaggtattaagcctagtacccattagttatttttcctaatcttctccctccttccacccttcactctccaataagccccagcatctgttggtccatgtgttctcatyattcagttcccacttataagtgagaacatgtggtatttggttttctgttcctgtgtttgtttgctaagagtaatggcctccagctccatctatgttccggcaaaggacatattcataatgttctttttatggctgcatagtattccacggtgtatatgtaccacatttcctttatctagtctatcactgacgggcatttaggttgatttcatgtcttgctattgtgaatagtgctgcaacgaacatacgtgtccatgtgtctttagatacaattcactcataaatatttcagtatttatcttcatcagataaagactttaaaaaatatgtaaccccaatcatttattacaaccaacaaaattaaaattaatttcttaatatgatctgacacccaatctgtgttcggtcttccctgattatatcaaaaagtctttttttgtttgtttgtttcaaatagttgttttgtttgaatcagatcacaaactacatttgttggctacaagttttaagtctcttaatgtatagcagttcccgtcctttgtttccatgccatttacttcctgaagaattttaaagttgataaatacatatgaaaacatggatttgtggccccttttgaataaaggagaagagctggmagcactggtttatactcccataaggcaacacttggctggagctgagtagaggctgtgaactttagacactgcaagttttctacagtccacaccagtccctattgtaccaactagcatgactcatttgtgttgcctgcgtagagccaatgggctttgagcaggccacctctgccctacatctgcttctgataggcaataagaactgatgcttgaaagatgatcttgaagtcctaawccctttctagccattaaatagatgcttagttttgtgcattacattgcttaggtaggaatgtaagcaaaaacgtttaaagatttttcaacaaagaattgaatcaacaattttttttttaaattctaagttaacctgacagtttatgaaytagcatytctcttttcttgagcgttccagttaatctgctttactgccttccactctgtaaatatccttttcacctgtgtgagggtttgagcctacaaaggccactggacacggtgtcacaagacccagacttgagtcctgggcctctgtgaacagtggaccattattttgcttctctgggtcacctatgcagagtagaggtaaaacagcctgtctctcagagttgtgtgaagttcaaataaggtaacagatgtgaaattagtttgtaaactgtataactttacacttaaacaaggtattactaggcataaggatatactgaattatgcctaacatcctcttttacacctctgtgcatttaccctgctgtttcctctccctgtaatgcccacaagaattaattgttagtcatctgtggtccctgaacactttatgcctgtttcttcgcaacgtttgtcacactgtgttaaagccatttgttcacatctgtgtctttggtgagattctgaaagtaaaccacagtttattcagtgcttagcatacaggtaacccttagtaaatgtcggattggataaatttgaataattactacctgtgtgcctatcttgaaggacaaagtccatgtatatacagttctttaggtatgtcatctggtaactgaccagtccaatgatgatgccaatgatgaaatagtcatgaaaatggagttwtgtatttttaatttaagaaaatgatcagacttcttgagtacattttttgcattgtatttttaagcccatgaacaatgaaagaatgtagatgtagaatgtctattatttaaaaayattttttcctgctggagaaaacttaagctcccagtcatagttcttggccccagttctctsgttctcctgattaatttagagcttmytgctcttttacagctggtttgccatccacccggtcagcatgaacaacagtaaccatcttgtaaacagtgacaatgtgggctatgcatcttacctgcttgagcaagagaagaacaaaggatatctacctggacaggtgagaatttatatcattgaaagcttcatcttgattcactgagtgtcatcattcatgctgcattcagaagaggtgattcaaatctccagaataaagtgtcatcatcaatctcacatattggtatgctygaatagacagcatttaccatcctccctaatgtggaaagaaaaataaaaaatgagtactaaccatttgctttttgtgttacatagtccttrtattcattgcttcataaagttattagttgaataaggaagggcaaagttcaagatttttataacagtagkttttgattaagctgaaaatatgacaaactgttgatatttacttttgtttttagagctatacaaggattaagcaccatttttatttttatttttattttttgagacagagtttcactctatcacccaagctggagwgcagtggcacgatctcagctcattgaaacctctgcctcccaggttcagcaactcttgtgcctcagtctcctgagtagstgaaattacaggtgcacacccccacgcccagctaatttttgtatttttagtagagacagggtttcgccatgttggtcaggctggtcttgaactcctaacctcaagtcatctgcccacctcggcctcccaaaatgttatgattacaggcatgagccactgctccaggcccaaatttggaagactatataatgggataagagtcccaggcccttacctacaattaatattcccttataaagatattagcttccattaacattcagcctgatcatttagctctgtcttagtttgttttgtgttagcagaataactgagactgggtaatttataaagaaaagaggtttattttggctcatgattctgttggttgaaaagttcaagactgaacaactccatctggtgagggcctcatgctattaccaataaaataaaaattttctcagaatattgcacataaatattcatgayagaaaacagamgaggaggccgaatgcagtggctcacacctgtaatcccagcactttgggaggccgaggtgggtgaatcaygaggtcaggagttcgagaccagcctggccaacatggtgaaaccccgtcactgctaaaaatacaaaacattaatcgggcatggtggtgtgtgcctatagtcccagctacttgggaggctgaggcaggagaattgcttgaccccaggaggcagaggttgtagtgagccaagatcgtgccattgcactccagcctgggggacagtgcgagactccgtctcaaaaaaaaaaaaaaaaagaaagaaaacaagaggaactaggatgtgcaaagagatcacatgtgaaagaggaagcaagagagaaaaactgaagaagccaggctcttttttaacaatcctgctcttgcaagaactactacaatccattccctagagagtgagaagccactcatcctgtgggagggcattattctattcaggagggatcagtctcttcctgctaggctacagctctcagcaatgccacaatggagatcaaatttcaacatgagttttggcaggaataaaccacatccaaaccaaagcaagctcctttgttggcaaaactcactcttactattttctcactttagcctgcattttagggaaaagaagagagttttctatttatgatcactgcctgagtgctaggcactatgaaataaattatctctttagtatcaaaaaagatttatatctccaatacttagttatctctttccctaagaaaattagagccatttaaggtagaatggtagagtggttgggttgaggcagaggacttgcatggctctaattatgttgaagagagagaaaatatacatcaagggcaagtccagattgtggatggtatatttagtttcattgtgcaacaggaaagtctgtatttgcttttttctgtttaagccaagagcatatttatttttaaagggcaaagggatctctgagctccagataaaacacaatagactagattgactggtcagcattttataatttgttgttgcacacagtgtttctggttaaaatatttctgtttgaggcataatttgaaactctcccacttgaatcagtgataattggaatattttcagtaataatatgtataccgactgtaatgtgagcctttacaggaataaaaagttttctcagaatatttttttctggatttttttttattattatactttaagtttttggatacatgtgcagaacatgcaggtttgtaacacaggtatacacgtgctatggtggtttgctgcacctatcaacccatcatctaccttaggtatttctcctaatgctatccctccccagccccccaccccctgacaggccccagtgtgtgatgttcccctccctgtgtccatgtgttctcattgttcaactcccacttatgagaacatgtggtgtttggttttctgttcttgtgttagtttgctgagaatgatggtttccagcttcgtccatgtccctgcaaaggatatgaactcatccttttttatggctgcatagtattccatggtgtatatgtgccacattttctttatccagtctatcattgatgggcatttgagttggttccaggtctttgctattgtgaatartgctgcaataaacatacgtgtacatgtgtctttatagtagaatgatttataatcctttgggtatatacccagtaatgggattgctgggttagatggtatttctggttctagatccttgaggaatcatcgcactgttttccccaatggttgaactaacttcaaactatactacaagggtacagtaaccaaaacagcatggtactggtaccaaaacagacatatagaccattggaacagaacagaggcctcagaaataacaccacagatctacaaccatctgatcttcgacaaacctgagaaaaacaagcaatagggaaaggatcccctgtttaataaatggtgttgggaaaactggctagccatatgcagaaaactgaaactggaccccttccttacaccttatacaaaaattaactcaagatggattaaagacttaaatgtaagacctaaaaccataaacaccctagaagaaaacctaggcaaataccatttaggacatagggatgggtagagactccatgactaaaacaccaaaagcaatagcaacaaaggatcccctatttaataaatggtattggggaaactggctagccatatgcagaaaaccgaaactggaccccttccttacaccttatacaaaaattaactcaagatggattaaagacttaaacgtaagacccaaaaccataaaaaccctagaagaaaatctaggcaaataccatttaggacatagggattggtaaagacttcatgactaaaacaccaaaagcaatagcaacaaaagccaacattggcaaatgggatctaattaaactaaagagcttctgcacagcaaaaggaactatcatcagagtgaacagrcaacctacagaatattttatatcctctttttattgcctgcaaatgattttgaatagtttgccagagtggatttaatgtttgtatttctaatgrcattcattacaggaaataggaaagaataaaaggcaacttggcatttcttttggcaggggccatttgtagcagcctttkcttcatcaaacctaggagatgtgtcccccaacattcttggaccacgttgcatcaacacaggagagtcctgtgataacgccaatagcacttgtcccattggtggggtaggtaattatgrcacatgaaatctttgtttttgcatctcaaatacattttatgtttgaatatttatcattaatttacaaataccttgtcttctagtatacactggcctagttctccctagcatctgctcttctcaaaagcacctgtccaaacccagtaaattttaactgagtgaagttatatttttccatttgagtgactgttaagktttttgaatggtgagacaattcagtaactgtcagagattaactctacccttccccaaacttgttcaatctgaaacattttgctttggcatttcgaaagtcacaagtttgtagtaaaaattgcctgcctgagacatttctcatggattataaagtttatagggtttttaatataagacctaaattgcttctcctttcttaaaaattacaagcaaaaaaattgctgtaaaaattcaaataatgtggaagtacagagaatagtaaaaagtgaaagtccctcttcgcctccctttcctctatactttgctcttcccagaagttactattctcatacctcctcctatgtatttayctatgcattyataaamaacattatatgacttatttatggattttgagttttgtatccaggacttgagttttccacttaatttgtcttagaaacttttcaatgagtatatccagatctgtgtgataygttttaaagacagcaagttaggctataccatcatttatttaactcccacaatgttcatttagctttgttttcaactttgacatgagcagtagatgctactttttgggttcttattctttgtgtttgtagaacatttcacctgtgataatgctttttttgtatactatttctgggatgtttattccatcccagtcaactccacccaayggggttaaaccagtattaataaagatttttttcttatcgactttttaaagctcctaatatattaaagtcttagttttgtcaaaatagtacaaagttttcctaaagtttatcagttgtctttctgtcttatttatgtcttttgccccctrtggaaatttaagatgttttacctgtccagtttaactaagcttgttctagataactttcaggagggtctgcccacaccctcatactacaaaatatgtttatccatattttcttttagtaattttttgattccacttataatatttaagtgcttgatcaatctcaattttttctgacataagaagtaggaaatagagccagatttgtttattgatttttttccccagaagtccagstagttgttccaatataattttaatcgagtttcartttaaggtgatcatgagtaagaatcagaggcaagaacaagcaagtagaaagatgtgcagtcaatagaaagacctggcttcaagtcttagctcagatattagatacctgcataatcagcaacacatcttttaacctgagcctcaatttccttatttttaaaagaaaggctccagaatagatcatttctaaagacattcactsttctaattccaggtatgattttgtttttatagtttgtactttgagagactacctgaaaagaaatgcaagaatgtggttttaaaaatctatttgcttagattcagttataattctttattccttaaaataatttcttacttggccaagaatgcatcatatcttattttgttccagcctagcatgtgcattgctaagggacctggacaggatatgtttgacagcacacaaattataggacgggccatgtatcagagagcaaaggtaagccatgggcctcgctcctttaatctttgtttaaaattgtcctttaaaatccattgacttggttcattaggaagttgaatacttaaagaaaacagcaaatgctcaggttgtgctggggagtctagaagaggtcagcttgggaggtggcctttgcaatccacatgggaacctctgtctgactkctcaggtctgacttcttataggaagtacatttaaaaccaagtaatcaggaaaacattctattttagaatgtctagaaagccagagtgctkgcttagacactaggaacatagactataagattttcaatttcttgtggcattagatatgaccagattgattcaaattctcagaagtctttaaggcctttgcttgccaaaagtcacccaactatctcttaacttttcctttggtgacaagagaaagctgagccatagaactccagttcttgaaacttggatttagattagttcctggtgttcttcaatatgcaaagatcatccakctattcttttctttttacaaaactttttgatgaagctctcttcatcaaatctggtctccagtgagattactatgaattactctgatttcctccccctcctaaattttatttcccattttgtccccatattttgtttcagcttctatggagacakatttctaggcaaaaagacaaaaaaattacctcgaactgagatgtccttgatatggttaaatctctttcttttcatagcttattcatacctttgctgcgtgtgtgtgtgtgtgtgtgtgtgtgtgtgtttaaatagtttattccaagggttctaaaatctttcaagagcaactaaggaaggacaaaagcacctttaaagaacaatctgacacaaaattggtagcaacagccagcctaatcgctgcagtttctttttaattactgtggtattatcagtggattattctaaattcacagattctatttagggtgtgcacccatgacacactttagtgtcagaaattttgttcccattctgagccggagagtcatagagatttgacccacattctgcattctcttctcagcaaggcacaacttctctcttaattaagagtggcaggctgcagctggtcttgctgatgacttwtgagagctctcatgtggccattgaaactggggtggggacagagtggaaatgagctaagtgtcaggcaagagaacgtttgatgaaacaggatttgcctatgttatataatgcgaattaataaaaacaaagagttktttaaacttgttttcactcatgtttcccataagattgaaaaagcatcaattgaccatattaaaacacaaaagcaaaagcacmgaagagtggattgtgggtgggcgargtgctgcagacaaagcagggcttgaagtcttccaagccacctttgtccccaacctgctgcaggactcaagtattctgaaaggaagaccctataaaaacacacaaagatacactctcactctagmaaagaaagtattttggtccagttattcctaatcttaaattttcttggtgatctttcaagtgagattgaggcctttygtgccacagcctgtatcactataatttcayttttgtggggagttgatacaggtcaacagcctcggagacttcaagcttytgggaaactcctgggtttggtagagagagacccatgtggttggtggccaattctaagcaaccagcaaaacaaaagctttgctgagagatgcatttccaaattgcatcaaattggtacttcctgartacagttggagatrmtcactttagcctttttgcttggaataataagcctgtgtgttttctaggaactctatgcctctgcctcccaggaggtaacaggaccactggcttcagcacaccagtgggtggatatgacagatgtgactgtctggctcaattccacacatgcagtaagtgctgctgagacacactggttatgccccaagggtgaagttttggtttgatctcattatttactttcagtttaacttttgtctttttcatttttgtttygtttttaaaacttttcctttagtcaaaaacatgtaaaccagcattgggctacagttttgcrgctggcactattgatggagttggaggcctcaattttacacagggtaaggtgaagtccagtaaaatctatggtttcagcttctgaagcttctgggttctgttctctgatcaggtttcattgtagccaatacatttattaatttttaaactcagggtctgctggttttccaggtttgtacatgaccatgtaccgcacccgctgcccccagacctaagcaaccactaatatttctgtctccatattttcctattctggacacttaatacaaatggaatcatataatatgtggcattttttgttggcttctttcacttagcatcatctttcaaaggttcattgayattgtagcatgcatttwtttttttgagacagaattttgctcttgtcacccaggctggagtacagtggcaccatctcagcttactgcaacctccacctgtcaagttcaagctattctcctgcctcagcctcccaagtagctgagactacaggcacctgccaccacgcttggctaatttttgtatttttagtagagatggggtttcaccatttggccatggtggtctggaattcctgacctcaagtgatccgcccgcctcagcctcccagagtgctgggattacaggtgtgagccactgctcccagcctcattctttttttatggttgaataatattccattgtatcaacatatcagatttgtttaaaccttcctcagttgatgaacatttgggttatcccatgttttggttattatgaatctataaatagtctataaatattcatrggatttttatgtgggtgtttgttttcatctttcctcttgggtatatatctaggagtgcaattgctggattatataactctatatttaatcatctgagaagctgccagactatttctgaaatggctgcaccattttacatttccacaggcagtgtatagttttctgattttttaatgtatttgccaatacttgttattatctgacttactgaatctagctaccttagtgggtgtggagrgatatctcattgtggttttgatttgcatttccctaataattaatgatgtcaaacaccttttcatgtgcgtattaaccacatatatatctcccttggagaaatgtcatttacgtagttttctccttttaaaatttgggttatttttctttttattattgagtataaatgttctttgtgtattctgtatacgttcccttatcagatgtgtgatataaaaatattttcccagcactttgggaggctgaggtgggcagatcatcaggtcaggaaattgagaccaccctggtcaacattgtgaaaccctgtctctactaaaaatacaaaattagccagacatggtggtgcacgcctgtagtcccagctactcgggaggctgaggcaggacaatcgcttgaamccrggaggcagatgttgcagtgagacaagattgcaccactgcactccagcctggcaacagagtgagactctgtctcaaaaaaaattttttttcttccattctgtaggttttttcactttattgattgtatcatttgaagcacaaacattcttaatttttatgaagtctaaattttcttttgttactcatggttttgtgtcatatataggaatctttttccagattcaatgtcatgaagatttccccctattttcttataagatttttatggttttagctctacatttaagtcttggatccatttttagttaaactttgtgtatcatggaggtaatggcctgcctttattcttttgcatatggctattcagttatcctagcaccacttattggaaagattattatttacccattctataatcttggcacacttgttaaaaattagttgacacatggctttatgtctggatgatcaattctattccattgatctatatgcctaaccttgtgccagtataaccgtctcttggttattgtttcctttaagatcagaaagtatgtctttcyaccttgtcctcctcttccaagattgttttgacttctgaatttcttgagattccacaggaattttagaatcagcttgtaaatttttacaaagaagtcagctgggattccgatgggaatatcattgaatttacagattaatttgggggagtattgccatcttaacaatattatgtaatctgatccacgtacatagatgttttaggattcatttagaccctctttaatttttttcaacaatgttttgtaattttaagacaaatacaaaaaataaattttgtattttttgttaagtttatttcttagtatttcactcttttctatgctattgtaaatggaaattttttcttaatttcatttttggattgttcatagaaaatgtatagaaatacaacagatagctgtattgaccttataycctacaaccttgctgaactcatttattagttctaatattttaatggatgatttaggatttttctctatacaagatcatgtcatcttaaaatagaaatattaatagttttaatttttcttttccaatctgaatgccttttatttctttttcttgcctaattgcctgcctagaaccttcagaacaatgttgaataaaagtraaaagagtgtatattctgtgttgttcctaatagtatggaaaaagcattcagtcattcatcattaactataatgttagctctgggtttttaatccttcatcaggttgaggaaatttacttctattcctagtttgttgagtgttattatcataaaatggtattagttttttggcaaatatttctctctgtatctgctcagattatcatgtaattaaaaaattatattaatatgttgtactgcattaatcagtttttgaatgtttaaccaactttgtattcctggaataaatcccagttggtcatgttctataacaattctttctctgtgttgctgtattcagtttgctagtattttgttgtaggtttttgtgtcctatttatcagagaaaatgttctgtagttttcttttcttgtgatatctttgtctggttttatatcaggataatattggcctcatagaatgaatcaggaagtgttcccttttctattattttggaaaagttttggaaaagctagtactaattctttggttggtggaattcagcagtaaagcaatctggctctgttatttgttgtaagtagttaaaaatgtgttatgaatcaatctctttactttttatagttttttttttttagattgcctatttcttcttgagtcaattttggtagtttgtctttctagaaatttttccattttatctaagttatctaatttgttagcgtacaactacttatagytttcctttataattctttttatttctttaaagtcagtattaatattctaatttctgattttaataatttaagtcttctctctgtttttcttggtcaatctagctaaagttttgccaattttgttgaccttttcaaaaaaccagcttttggtttcattgatttttctgttttctttctactcactgtttaattgattttctttcgaatactgattatttccttctttttcaacatttgatttagtttgctttccttttccaatatcttcaagtggaagttaggttattggtttgagatttttcttctttcttaatatatgggcatttacaactataaatgtctcactgaacacagctgtcactgcataccataagttttgatgtgttgtgttttcattttcattcatgataaagtatttccagattttcctttgatttcttccttgattattagctatttcagatcatactgcttaatttctgcatatttgcaagcttctccattttttcctttatttttaatttcatttcactgtatttggaaaacatattttgtattatttctactttgtaaaatttaatgagatttgtcttttagccagcacatgatctaccacagataatatttcatgtgcacgtgagaagaatgtatattctgttattgttgggtggagtattctatagattggtaggtctagttcaagttttctgttgatcttctgcctagttgtyctatccatgattgagagtgggttattgaaaatttcagtattgttactgaaatgtgtatttctttcttcatttctgtgagttttcagtttatgttacacagacatttataattattacattttttgaatagagtrtagattcttaattcataagttttatagttacaaaaccttttaccccagattatgcatatgaagtttatttttgttttttactgctttgtgtgtgtgtgtgtgtgtgtgtgtgtgtgtgtgtgtgtgtgtgtgtgtagataactaaattcaggagaaattatttcagggaccataagtcagacaactggtattgtgagttggaggcgtaatttttcattttcaaaacaggaaaaaagtgatttagtccacaaatctgcagttaattatgtcaaactgtttttatttgcaacatgaatgagcaggagtaatagaaacaaaactttaaggacattgacaaaatatactctgtcgttctcttgaccacactgaagatctaattaaacaatggctcatgtcttaggatgcacaggacatttttyctattctattactcaaactgtttggaatcattgaacaacaacctcaataaaatctctgaaactccttaaaagattattgtacaatatttgtcaagataatgacttttttgagagggttggttcaaggaagtatactaattataacatttctaatagggaaaacagaaggggatccattttgggacaccattcgggaccagatcctgggaaagccatctgaagaaattaaagaatgtcataaaccaaagcccatccttcttcacaccggagaagtaatgcattttcgttatcatagtgaaattagcatattgttatttttaaatatgtgaactgtcaggtaatgaayggtagatatctactgagatgggaagtcttatttagatattcccatatcaagtttttaatattaaaaaatgggttccatgactctaaggaatgaaggttatggcaatgaattatattgatttacctattgcacttatgattaataaatacaacaattaggacagtgggaaaggcagaataagatgaacatttatcttactcagaatttatttttgttggttccaagaagggagtcagcaccaaattttctgcagaagaaaatatttcaggtcatctaaaacaaaacatgttcctgtctaaattttctcacagttcaggcaacattatcaactaaagcaattttcttttacactcctttgaaacatatattttgcattctaaatgtcaaaaggtcatttcagtattcataaaaacttggattgttgagttagaagcattttaaaaatacatttttccctaatatcctattaaaattcttgaaagaagagaggaaaggaaggaatagagggacaggctatagtattctgaataaggaaagggttaaattctcttgggagaaatcttggaaaataaagtaagacttggaaactgtaaacttaaagtgcgattataataaaaagagaaattattaagttaaactattccaaatggaattccttatttattgtgtataagaatagtcaccaacagtactctaggaaaatgtttggttatctgttacacattgtgatttcacgatgacagatccaccaaaaacttcattgatttctgcaggttaatggggctttggcatttgaaattctcatgttatgactaggacataaatgcccatatagaatatttaatacyacatcataaattagaaactagaggaaattctgggaccactatatgtctgttgaccatagagagagtgttatccctaacataattttcttgttttgggttctcagctatcaaaacctcacccctggcatccagacattgttgatgttcagattattacccttgggtccttggccataactgccatccccggggagtttacgtaagtttttctttttattacttagttaaaaatgtgtttgttgtatgttctgttggaattgcttcttatcatgaaaagatcattctgtgttgaccccttggtatcctactgtactgtttggtgacagtggcaaatattcctaccctcttttgctggggcctctgaagaataactatctctatgcttattattgatggctcacctgaggcagacatgaaaattaaaaaaaacttatcccaaattaaaatgatgccatgagttattatatcagtagaaagatttgcagtcatattaaaatacaggtacttgaaataatcagattaggtattaaaagcatggaagaatgttttaaaactccttgatatgttgtcttcctatctcagtaactggcaattttatatctttccagcaggtcctatctcttggagtcatccttgaattccctctttttctgtttcttcctctttaaattcttcagcaaattttgtacactctacccaacaccttctgtcacttcccttcctggtctaagttaccacgatcttttacacagatttttgaaataacctgctgtctggtctgcttcattctgcctttactcctctgcagtttttttttctcaacacagcagctagattaagccctttaaagtataaattaaataataacatgtctttgctcaaaaccctccagtagcttctcatttcattccaggtaaatcctcaaacttgcaagctcctacatgatctgttcttcatcaagctctcatatctgatttcttacctctctcccctttactcacctctgattcagccacattggctttattacacttatacagtaatgtattttctacctacctcagcttttataaacatagactgcaactgatcattttgttgactcaagaatggaaaataatgatgatttttgccagtgataaccactgattctgtttccttcttttagtcaaattgactgttttcagtttaggatttattttgaagctaggacaggcagaaaaaaagttcaagtttagcttttcatagtcattgggttcctacatattttactattgtgtgatgagccagggtaattttttggctttcactgcmagtgtttctgygtactctgcatacgtctagtaggaaaacgtttacataattkttttcttgactcaggaccatgtctggacgaagacttcgagaggcagttcaagcagtaagttaaaaataaaataacatatctacaygttcatgtttggtgaagaggaaagtatatcytatccctatgatcctatatctagagttccacatttcttgaaattaatggctaaggttaatatgaaatattggtagtataagaaccagacttaaaaaacataagggcattatcattaggttaaaaatattttattggtatttatgtattaatattttaaaatttgataatgtttgtatacattaaatactaagtaacctctaagtacctcaatatcttaaattcctgtgaacagtctaaataaaatgtattacattttgggaattctgtattttatctgtgctgtattttgaattttctttatattcaggcagtattgtaaatggttctaaaatgacatgtcaaaaatgtcttgttacttagcgctggaaattactattctggttagctaatagccacccattagattttgtaataagttgattttttaaatccctattttagtagtaagaagtttctacatctgcaactgtgatcatcaaggtatttgtagatccattgacttgtccaactgtagtgcagagttagaaaawttttattaagaaaaatatcttaaactaatagtgtaatcaatgcttgtgtgttaaggataacagaatgaaaatatacktaaagatgaagagtaattttattgggttttacctttctctcctaggaatttgcatctcatgggatgcagaacatgactgttgttatttcaggtctatgcaaygtctatacacattacattaccacttatgaagaataccaggtaaagcaaaacgttttcatcatttaaatgaattataccccagtaaagactattgkgtcaaatgcagacttgctttgtaaactttcccagtcatgtttctgagagatgattatgtttcaggtataacaggtaagaggatgataagccagaggccgtatttaagagtttcaaatacatcattttaagtccaggtcagaattctagttttactgacttacattttccctgaaattaattattttgtcaggggcattggtaacaagcctgggttgtggcataaaacatttctaacactattcttaatgcatttgatgccttaagcctctgtagcactggagaaaactcctactagtagctgtttattgaatgcactggttaagactttgcaaatgttatttaaagtaatcctcacagtatatccagaagtagggtgttattatattgatatatatcaagaaacagagtcccagagagtttgagggaggctggtagctggtaatatttcattgtttataaatagtccagaaagcagcccaagtactttttaagtaaaacatgaaaacagtccagagtctcataattaataatttctgttaataatatatctgctggtatataacagcagtgcatacagaggcatacagtctaccccttggtaaatattcagtgatactaagagtagactytgccctgctaccctctgttggctttcctgaaggtccctgccttctaggaattcccattgaaaaagggatcttaatgatgctaaacttggataggaagaattacatcctttcttcactacctctaactattattaagcatttcagtcaattataaatataggaaacaaacaaattattttagcagtacctctgtcaccaataggcaccacagatattttcatatcacatacagtgattgcaggtctagaaatgtcttttactcttattgctattttataatcacaatagttattagatccacagatatatcttgttattcaatagcataataaagaagcacatacattactgtatcacaacattggtttattatagtatggtaaatatatttcaacctaactggtttcctttgtcaattccatgtattttattttacacctttagaaacattattctgagggaggtccttaggtctcaacatgctgccaaaggagtccatgtcacaaacaaggttaggaacccctactagcttgtctcctggtccaggtgagatgggaaagttccctgaacccccctgcagtatgtgcaacaggggtgtggctcatctgtttggctgctgtatatgctcaaacccttaatgggaaggggagcatacagacaggcaggtgcaggagccaaggtaagtgcttttgggtgctggcaggagcaaattccatgtggtccctgcagcagtatctaggtatgggtgcctgctactccagaagcccaagtgggcatgtattacatacagtgcacttttttagctttgctgtctgcagatagcttaagtgttaaacagctcagtgccctcttggtacccaggtccttgtccagtgtctaggaagaatcaggttgcaaatagacatgaaggatgaattcagggttttattgagtggtagaggtagctctccgtgggatgaatggggagctggaaaggggatggtgtgggaagatgatcttcccctggagtttggctgtccagtggccaatctcttctccaaccatccacagccgaactcctctcagagttcagatgctccttctcttttctctgctgtgccattctgccattctgcttttctgttcatctccttgtctgyttgtggagctgggggtttggggtttatatgggtacaggataggggggcgtagtgaacaaaaaggcaaaacaggaatgtttggttgcaaaagcagaaatgcttgttcttgtttagggccacaggtttccaggcttaagggtggggcctttgccagggaaccactctcttctacccaatattttcctgtctcctgtccatatcacagggatatactccagcaagtattactattaattacttcattcattcaacagatatgtattgtgacagatactgtgctagccactttctggggcataatgatgaaaagaatctgtcccttccctcaagatcactggaagctgggggtctagtaggaagacagaaaaragaacagatgattacatttycatgaaaggcatgcacaaggtgttataaaaataaagagaaagagcaccagcccagactgggtatttgagkactgggactgttcaggaagatgtaacatctgtatgagttcttgacaacaagtgagagttaagcaaataaaragtaagaatgtatcctatatagaagaaacgatatatgcaaaggtccagagggcaggcacattgatggaccacaattmgttgagtagcatggagtaagtatgcggagggtgatggtaaggagatggtagccagagtgggagacacaggttagctgatggatagtcttgcatgctatgctactgagccttcactcagtaaggaaggctttgggggaactgcagtaggattctaagcaagagaatgctttgataaaattttgtgatttagaaaggtcaatagatggcagtgtagaaaatgaattggaagggcttgtgtataggcagaggactgattaagaagccatagtgtaattaagatctgggcaagacatgracatgcacacttgagggtgaaggctgggaggagggagaggatcaaaaaactacttatcaggtactgtgcttattacctggatgatgaaataatctgtataaccaaccctcatgacatgtgatttacctatataacaaacctgcacatgtacctctgaacytaatacaaatataaaaaaaaagagatctgggtgagaaatgagggtttgaactaaggtgaaatctatttgtaccttaggagaaagtaagacaggaaaatgaaagatctcaggagatttgaaggagacagaattaccrgatgtggagactgataggatacaggatgagggagagaggagtctaaggtaactgccggctgatcctcacatgggagactggaaagatgacattcgctgagatgagaatgttgtggaggaagctggtatgtctgaagtggtgaggttggttttagatttgataactttgaarttcctgtagaagaaccaaaggcctggaggtcagctaaaagatgcatttggctcaatttcatggctttgtgatggattaaatgtctttctccagttagcaccttctaactatttatccagaagttactaggactctttattttgttttatttttcttctgatatatgccctgggggaaagcacttatattacaagtacttataatagactaaagcttaggagctagcaccstctttcatagtaaatagagtgacagtctaaatggcmtaagcmgagagaacccactgcttttaacaggtagtccataggagtcacttaccttggccagtaaatggaaatgcccatcctcttttgtcatacataatcttgaagattgtgccagttttgaataatgtgagatgtcaagcatcacacttaccyaaaatgctacacctctgtaaatggatttaaatawgcagaaccatakrcaactctccctgcctttcctgcaggctcagcgatatgaggcagcatcgacaatttatggaccrcacrcattatctgcttacattcagctcttcagaaaccttgctaaggctattgctacggtaatcaaatattgtttgtgcgtgcatgcgygcgtgygtgtgtgtgtgtgtgtgtgtgtatgtctgtatgtgtctgtgtctgggtaagaaaatgcagagggaagtgaaagagaaccttagcttygagtgttcagtttgacaacctttatattttacaaaatttatagttttgtggtatctctaagaaaataaataaaatttmtttccaaattttggatctagttaacatcctttcatggtggcagcttctttcatatatattttctcactatttttacaaccatcatgtgaaattarggagatatcatttctccccagttttcagaggagcacataggcttgaagataagtgatgaagcttactacacctgggagttgaacctgtgttytctaatccttgccagattctccccactcactccaaaagttgagtaggtcagcattctargatgcccattttccacattataatatcttggaaattgggatgcattttccaatcagaggaagcttattattataattagtagcatgcttttactttcttggtggttcaaaagataatatgagttgttaaatcaatggaagcttagatttgatgtaaaaatagtggtgccttggaatraaaacattgcatctacctaaaatatataccrctgaacaagtttacttgatttaaaggaacttcacttgtggaaatcttccctttggatgcagttgtttatgaagctgcaactgtgatgtcagaaggttagtcaacaaacaagtaaagagcttaaaataataagcagccccttatataataatatgtaagcctcagtaaaaaatgtgaaacaattgtggcatagcaaagaaaataaagcccttttaatgaaagagcttggatatattaarttgaaatraatgaaatggttgtctctgtaggttgcatcartygaacgttgaaaatttcatatgcctgtattattagttactgattgtgtgtttgaaatttcagtattttatataatttctttgcacatattttaatcaattgatatttattttcattttatyataattttggtctcagttttaggttactttttttgaataactgtttgtatttatttatttatttctattataaaatccaaatctatttgtaggtcattcagattatacagaaaagcataaamctataatccatccctagagataactactgtttaactgtcactatgctcataggtctatagttcttcccaagaaaatagattcttcaaattttgtagtgacaatgaagaaaaatgcaattaatttggtggaaatttgttttacagwcaaatttctggtcaagcaccttaaaactagctatgtgatcttgaaaaaaaccactgaatatgtctaagcctattttctcatttgcaaaatgggaatggtaatacataacctatctcatatgcagttgtaaagattaaatctataatgtgaggaataaagagcrttaaatattcattgaaaktaatggcaaaatgccaattacttttgtaccaacctaatatagatatagggatatttgaaaattgagatttgtatttttatgacactattaaaaatggtaaactttgtgggcaatatagattaaaccagtcaggatgtgggatgatcttaaattttaaattaaaaatatatttattatattcttttattagcacagacaagaatctaggaaaaaacttggtactcactccaggtgagagtggctcaatactttttaaaaattaaaataataattacactgtcatggtataattayctttttgcatgttaggcccctgtacaargtcagacaatttgaaagtatgcttccaaccttgtactctggtcactgtccttatgttgtctaggggaatraaagagttgcctatgaccaaaactttctcccagtgacaagagtttaaattatgaatttctaggctcatgcttagcaaggctaccttcctattttgctcaaggktgttagctcttggagtatgtatatgtgtgtgtgcactcttccattaatgcaggcatttctgggtctggaggcctggggaaagggtctttgactctacctgtgcactccttaacaaatgctctctgttccaggacayggtagccaacctgagcagaggtccagaacctccctttttcaaacaattaatagttccattaattcctagtattgtggatagagcaccaaaaggcagaactttcggggatgtcctgcagccagcaaaacctgaatacagagtggtaagactcatgagcagaccttggaatcctttagagggatgttttgggggatgtcactttgtgtcaccatttgcctctaatcatgctgtagaccaactgttagcaatgataattttgacaattgttcttatctctgcaaaagtaatgagaatggggaaatatttattttttgtaagtaattgtgtcaaattgaaattctaaaatccaaattattccttttcttaagtgaatgatcatggaactattcactggcactgagagttgtctcttaagtcaaggataggaaaaacatacagaaatgaagcagaatttgtaccattactattttatatcaatcttgtgtcctgaaagcttgctgaatcagttattagtttcaacagtttttctggggggaggagggatgagtaagaggggagtctggattccttaggaatttctacatatagtatcatgtcatctgtgaataaaaataagcttatttattcctttctatatttcttttctaaatgcacctaattatttatccttatyggactggctagaaccttcaatagaawgttctgctttttaaaaaattttatttaattttctacttgataaataaaaattatatatatttactgtgtacaagatgatgttttgaaatatgtatacatggggaatggctcaaytgagctaattaacatatacattatgtcacatattattttttgttgtgagaaaatttgagactttcttaacaatttttaaaacacaatatgttgtttttaactgaagccatcaagttgtacagtagccctcttgaacttattccctctgtctaaatgaaattttatattctttgatcaatacctccccaaccccctaacctcctagcccctggtaactaaccttctgccaacattctactctctacttctatgagtttaactcttgaaggttctatatataagtgagatcatgtggtatttatctttctgtacctggcttattttactgaatctaatgttctccaggtttatccatgttgtatcaaatgtaaggatctcattcttatttatgactgaatagtattccattgtgtatatgtactacattttctttatccattcatccattgatgaacacttaggttgtttcatatcttggctattgtgaacagtgctgcaataaacatgggagttcacatatctcttcaacaaactgatttcatttcctttctctatatacccagaaatggtattgtgtatatattttacagtagttctatttttaattttttgagaaacctcttgctgcttttcataatggctgcactaattcacattgtcatgaacagtgtgcaagagttacctttttctacattcttatcaacacttgtcttttgtctttttaaatattatacattctaacaggtattaggtgatatcttgttgtagttttaatttgcatttcttcgatgatcactgatattgaacatttaaaaaaataccctgttgagcatttgtatgtcttctttagagaaatgtttattcaggtccttttcttattttcaagttgggtcatttgttttcttgctatagagttgtttgagtaccttatatcttttggatattaactctttattggatgcatagtttgcaagtgttttctcccattctttaggttgtctcctcactttgttaattgtttttttggttgtgcagaaactgtttagtttgatgtaatatgtgtctgtttttgcttttgttgcttttgcattaggggtcatattaaaaaaaaaaaaacatcgcctacaccaacatcatggagcttttcctctaggttttctttcagttgttttatagtttcaggttttatatttaaatctttaatcaattttgagttaatttttatatttccttcttctgcatgtggatatccagttttcccagcagcatttattgaagagactgtcacttccccattgtgcattcttggcacctttgtcaaaaatcaatttatcataaatgtgagggcttatttctgggctccattggtctatgtgtaccaatggtgtgttgattactttaggccagtaccatgctgtgttgattactatagctttgtagtatattttgaagtcaggttgtgtggtaccttcat

SEQ ID NO: 95566 - DNA, 35595 bp, Homo sapiens
gagaatcgcttgagcccgagaggccgaggttgcagtgagctgagatcgtgccactgcactccagcctgggcaacaagacccagactccatctcaaaaaaaaaaaaaaaaaaaaaagactaagtcctcccttcatatctagaataattgtaatgacaagtttccactccatttccacaacttcaacaagtgaaacaagtttttccttagttttcttcttttacaatagaatttctcttgtaattttgcacgtttagccccttaacacatttcatccccaatctaatacaacgaacacttgcccactgcaagaagaggcaagatacaaacccaaaccaggtaacttctgttccaaattcacaacccaatgagacagacagaccgacacatacacaactaagcaataatgcaagtcaggccgaggtgttaactttcaaatatcgtttgtaaaaataaaacttgggaaacaggccgggtgcagtkgctcacgcctgtaatcccagcactttgggaggccgagacgggcggatcacgagatcaggagatcaagaccatcctggctaacagagggaaaccccgtctctactaaaaaatacaaaaaaattagccgggcgtggtggcaggcacctgtggtcccagctactcgtgaggctgaggcaggagaatggcatgaactcgggaggcggaggttgcagtgagcggagatcgtgccgctgcactccagcctgggcgacagagcgagactccgtctcaaaaaaaaaagaaaaaaaaacaacttgggaaacacgaggtcaggtgctgcctctgttttgtttccacatcttaggcttgaagctgggtagaagagatggaccctttagaaaatattcctggtggccaggtgcagtggctcatgcctgtgatcccagcacttcgggaggccaaggcaagtgggtcacctgaggtcgggagttcaagaccagcctgaccaacaacgtgaaaccccgtctctactaaaaatacaaaaattagccgggcatggtggtgcgtgcctgtaatcccagctaccctggaggctgagacaggagaatcacttgaacccgggaggcggaggttgcagtgagccgagatcacgccactgcactccagcctgggcgacagagcgagactctagggaaaaaatggagagagggaggaagggagggagggaagggaaggaaggaaggaagggaaaggaaaggaaaggaaaatattcttggcgccatcctaggagccacaacagggattctgccactttctccaccggcgcaactcacatcctatatttagaggggcttacgagggctattatgtttctcaggatcaaacaaacagaataaacaacaacaaaatttttaagtgtaacattccacccgcgggaccattgatcctgagggcggggaccctcatttacccccaatcccagctcccaaatggacctaagtggcgttagtaatggggttggtggcattggtgtgcaaaaagtgtgctcaatctgcacgcacacacacacacaccacccacaaaaaccacggcctcaaatggcggcctgttttggctcctgaccgcggtgggagagaagaggctccagtccgagttgagacgctcttccaaaggcctctcctgacccgcccacggagtgggggcagtttggtatcaacgcacagtctttcccttctaggccctcctgccaacacgacacacaactttcgccctcagtttccctcgcctccgtcaaccgtcgtccaggcggccccgtcagcaaccgccgcccttcccgcccgcgaagaaagcgcgggaatcaggctgttcgcaggcgccgtggaccgcgcaggcgcagtggccgccacctcggcgcgatggcatcttcgctgcctgcctggccgcccttggccgggcgcgatgacgttaacgctcttccttggcgttctcacactgtggacccagggatggctccagctccttagagttttgcccagagaggaaaggagactgtcctgtgactggagagacagaggcagatctcctgcccaaccggcctcagccccaccatcgtctaaaaagtgtgccccacttcccctcaccccctggcccttagggtccagacatccgtttgttagatgctggtggccacccagagtgtgcccagagattgactcgaaggccacccgaggtgtctggctcaatttctgggtcggatcagggtcagggaatctgagtccccgggaggctggggacagagctgaagcccaggttcagatggcggccatggaaggcggagagccgtcagcgaggcagcgccggggctgcgggagcttgcgggagggaagcgcccgtgagccgcagagacgctctgcaggggaagccgcgtggtgtgcgaccctgggcgttgagctccaggcttcctggcaaagaggactgtggattcctggccctgtgaccttgggcaagttacttactgaacaccctctggacctaccagtaaaagaacaataacaacaatcgccctaaaaatactagaagatgaaatagacaatcctggcacacagtaaatgcccagtaactgttagcccttatttaatttgagtaacagtagctgccatttatccggaacttactatgggccaggtagtggattctagagctgtctgagttcaaagcccatgttttgttgttaccgtatcttctaaccatttgaagactgggatagggaagggcttagagatgaaaggaagattgttagtaaaggcctaggcctataagaccacagacattttagtagttgctttaaaactatctcaagtaaagaagagtgttagaaaataatattagatgtagactgagaccagataatagcagaccttgaatgccagagtaaggaacagctttcaaggaatagggccatcttttattttgggaagaagaagacttgaacaataaaaataaaacttgttatttatcatggttccagagaggagttacccaaaacatgaatagaagcttcagggaagcagattttgacttgatatctacatacggatgtgcatacatttacaacacacacccacccaccccaaaaatagatttttcattaaaaaaaaaaaaaaaaaaccaccttaagccgattacttctgtagggactgcagacatgagcaatatagaatatttgctagcagtttataaacttaatctgttttatacttgtctttttctgcttatttatttccacctggaaagttggtcaggatggatcacagggaaggagaaaactaaagtagtaaaagtagtttgattacataactactgaacatcacattatgtatgagacatcttatgtataatatttaacaaaaaacccttcttatcccccagtcataccatttgggaaacaacccaccttaaatttgtctcctacaaaatttctggcagggatctactggacagccatgactgtgaagtaaaactctgctctccttttgttttgttttgttttgtttttgagacggagtttcgctcttgttccccaggttggagtgcaatggcacaatctcagctcactgcaacctccgccttctaggttcaagtgattctcctgcctcagcctcctgagtaactaggattacaggcacccgccaccacgcccaggtaattttgtatttttagtagagacggggtttcaccatgttggccaggatggtctcgaactcctgaccttaggtgatccgcccacctcggcctcccaaagtgctgggattacaagcatgagaccacacctggcatccttttgttttaaactacattattttattaatacatcaggcaactctatcccacaaaacatttgtaatgctggaagttatgcttactcttttaagtacttcagaatattatatattcaacttaataatgagatagtgacaattcgaaagggtttcacttcgtatactatcagttcgctgagaactaataaaaaagtgtggttttttgggtcatcccaaaaatcaagtacactttgggaaacagggagttaaaaatctttcggaagttaacttggtataagagtatgaaaagcctctgttgctctasttctgaggaaatgctctcctttttcctaataaagctttccacagaagacaaactctgtacacaaaaaacaaggtaagtatgggaaataattgctgcaattcattaactctcaaaaaagttattcattttgacatgtaagagaaactttatttatgaatgtgaaatgtgcttcaaagtgctgatctgttaaaattccataaaacaagcttcaaaatgcaagtcatttgtgccagctacgagtaaataactgaagcagcatttccagagagactagggcaaaggacagaacaaactacaaatcagcagaaaagaaaccaagcatagtagagtgttaataattcaccatggttactgctcttaaaaccaaagcaactaaacaactgtcatctgtttacttttacgtgtgttttcatcatctctacaccgtctgaagtgttcagtgtacatggatgtggacagacagtcaaagcctacaggagctttttttttctattagaacagtcattttaatgcatagatttgatgtggttattttgctttctctatctctgcattataagctcttaaaggaagaacattcagtgggtttattaaatattaggaagcattcatattttatttttccaccatgtatttggtttgtatgcatgtttgtttcctgagcacactgtaatggctgtttatgtgaattctgaaagagcaaaactagaactgtgaagaagaccaaaaataacagagaggcaccctattgtcctgtgaaaaacactagacttgggatgagaaacatgggtctcaggcctaggttctcctacatccctgcagaaccttaactgagttacttaacctctctttcgtttacccctgcagtggggatgtcaacacctaacccaccctatcgtataaaattaatgtatgaataaactgagtgaaaggacattataaattaaactctgcaattgtaataaattactcttattgtaccctctatcaaacaacctggcgttactagtacatggtattcccagtacttgaacatatgtgactttctgggtgactgagcatgaaatcaaatcagatttggctcagagtcatttctccaaagggatgtaatcatcttagtattctggaaaatttcccctaataagacccctttttgagtaacacagtccagtggagagtccccgctgacagtgaataaggctgtgtctatgtaagttcacatgatgtggttagcacatgcagtgtgtcccaagacattttcaggcatcacaaaaacttgaaaagtactaacagttgtctttcctttggtatttaggcaaaaaatgaggaagattcataagtaagttaacacagaattaccaaaaacctcatgagaaagaaatgaagggatgtttcagggtagcttttcgagtcccaagtgatcattgatttggcccttctgtttctgattgtgaaaaagcattctgaaagaatgggcgccggttcaagaggaggtctctgagggtcagcctttggctgtttatagaggtgagattcaaatgccctcagatcatgaaaagtgcttgaactcatttcagagaagaaatgttttgaaatgcccgtggaaatactgagtgggccacttttttattttgtgaaattagaaacgtataaactatttttattattacagataattgtgaaagcctcactggatgacatcctagctgaggaaaagaatggaatttttgtattagtatgaaatgctaatttattactgtatttagatctactgaccatctgagggagttagaagttaaagtaaacagctgtatctctagttgatctttgcatattttaatccaaatatggcaaagggcagggctaaagaagggagtgtccataaacggggctcagaacttgtaacagaaaattaaaatatactccactcaagggaattctgtactttgccctttgggtaaagtctcatttacatttctaaacctttcttaagaaaatcgaatttcctttgatctctcttctgaattgcagaaatcagataaaaactacttggtgaaatgacttcttgtcacattgctgaagaacatatacaaaaggttgctayctttggaggaacccmtgggaatgrgctaaccrgagtatttctggttaagcattggctagagaatggcgctgagattcagagaacagggctggaggtaaaaccatttattactaaccccagarcagtgaagaagtgtaccagatatattgactgtgacctgaatcgcatttttgaccttgaaaatcttgggtaagactatgctttgtattgtatatgtatgtatgttgtgtgaaaagtggtaggtgtgtgaaagagaacacatatatgtatatgcagatgataattcatgtccgtacatgcagtcgtatgttgaayaagatcactttcacttttaattatacygcattgtgaattgcacaattatctaaactgggcattcacatgctcttttataaaccttcttaagcaccagattattaagttttcttttcaaatgtatacagactgagacaataaatagaaaagggttttgttttaaaatcatacctttaaagaaacagatttaatactcctttgcattgagttagtgtttggccactatgcttgcatataaaattgttagctttttaggaaattcactacgttttcaagcaactatgcttacggtaatgcataaagttctagttcaaaaaatgtaatgtttcaagtaatatttgttgaatgaaagcgtgattaaatatcttttgtcagaagacatcagacactttgggaggccgaggcaggcggatcacgaggtcakgagatcgagaccatcctggctaatgcagtgaaaccccatctctactaaaaatacaaaaaattagccgggcgtagtggcgggtgcctgtagtcccagctacttgggaggctgaggcaggagaatggcgtgaacccgggaggcggagcttgcagtgagccaagattgtgccactgcactccagcctgggagacagagcaagactccgtctcaaaaaaataaataaataaataaaaataaagacatcagacctccctgtgatccgaagtagcagacrtacttaacttccatggtggattgttgtagatgggataccagagatgagaactaaagacaccatctgaattttcagagcttatattttgctgatttgtaatatattgcatacaacgtaagcagtcataacatgctaggttaggtccttattaattatttttgccttcgtttacatcataatagctaccactgtggatataatatgactccacatatttgctttttaccacttctttctttctttctctttttgagatggagtttcgctcttgttgcccagtctggagtgcaatggtgcaatctcagctcactgcagcctccacctccgggttaaagtgattctcctgcctcaacctcccgagtagctgggattacaggcacttgccaccatgtccgggtaattttttgtatttttagtagagacggggtttctccatgttggccaggctggtctcaaactcctggcctcaggtgatctgcctgcctcagcctcccaaagtgctgggattataggcatgagccaccgcgctgggccgctttttttcttttactaaaaaatattctgaaacatctgtttttctcaggaaactgtgccaggtactgggggagtacacagctctatacaacttggtttctacccctcaaggagttggtagactactagctaagatataagatacatggccgggcacagtggctcacacctgtaatcccaamactttgggaggctgaggcaggcagatmatgaggtcaggagatcaagaccatcctggctaacacggtaaaaccccgtctctactaaaaaaaatacaaaaaattagccgggcatggtggcgggcacctgtagtcccagctattcgggagactgaggcaggagaatggcgtgaacctgggaggcggagcttgcagtgagcagagatggtgccactgcactccagcctgggtgacagagcgagactccgtctcaaaaaaaaawatatatatatatataagatatgcacaggcacaactagccactgttctatgtgcttgttttctgatcaactctaatttgagttagatcactccttaggtttagtctcaacacagatcaaaacatggacactactcttaatagaaacatgcctcactttatggaatagatgtttttcagggcaattatactgcagtcatcctgtttgtatcaaatcatatttttactagcataaattttaatttgagaaatgctttatcttcatgactgaggttatgtcaacacaattcatgcttatctattgacctaagagagctgttaactaacttctatattacaagtaagaatttgttgaaggataacttttagtcggcatattaacttcccaaataggtgtgaaatggactggggtgagtttatgagcacccagtagtatgcatttcagtgagcacagtcttttcacttaaattcactttctgctccttactgttaacactgttcagagactagactgttcccagcgtggttgaaaaattataaaatagataaactaattaacttctcccatcctgcctctcccaaatttattcattttcctatattcctcatctcagtggtggcatcattatccaccaagtcccctgtgaaaatcaccctagaaccttcccagtcctttgtctcccacgtctagtgggtcactaagtcctcccaattattccttgcaagtacttcacaaatccagccttcctctccagttttactaccttagttgatttcctctgtggacagttagaatagcctcctaaagggtctctctgcatccagacttgctctgacccttcctgycatctattttccatctgatacctctaggaatcatcctaatatgcaaatcttatcatgtctctcccctgctgaaaattctttaaaaatgtatccagaatagatttaatcaacttagtatggctaatgcccttcagaatctcactcttccctattcttcatcccttgggactcttccaatgggagctcaactgcaggcatgagaactcaaaagtgtccatctttttgaaaacttccagacttgactctgagcaactgggtagatactagcaccatttactcaaatgcggaagaatgatatagaaccaaaattgtcgggsgcgacctcagggggttatttcatgaattaacttttaaaatgtataaatatccattaggcttggtttgcatacaataggaacctaagaatagtggtttaaacaaataagggtttcttgttcacaaataataagtccagaagtaggctgtccagggctgatggagcggccacatgatatcatcaatgccacaggctccttctaccttcccacagcactgtctcaacatggccccttccaccttcccactgcaccatctcaacgtggccctttccaccttccccctgcaccgactcgacgtggtcccttctaccttcccagtgcactatctcaagatgccggctttgtcctcatggtttttgcttcaaagtcacaaaataactactccaccttcctgatctcattccaggcaggaattagcccattgtacacagtaggtcccttgaagatactagcaaaaataaccaaggaatacaaatagatggaattttaggaaaatgtggttgaacggtttaatgaggaaaagtaaatgaaaaacattattatatctagaaaaaaaatgtatcttaaccattgtgggaagtggggagagggtagaggcccatttgagaatggaagaaaaactactggcccttgtgccagaaaaaaaatacatatatctgtacctgcaaacttgtggcctttttggagaggttacagactctgaaaactctgtccctggacctctagtggttcctggacctcaattaagaatctctaattaggccaggtgtggctgctcatacttgtaattccagcactttgggaggccaaggcaggaggattgcctgaggccaagacttctgtaaccacccagcaagttctcctcatccgctgcccagacrgagctgatttatcaagacaagggaactgcaataaagagtttaattyacacagagccggctgtacagaaggccagagttttattattactcaaatcagtctccccgaaaattcagagactggaatttttaaggataatttggtgggtagggggccagtgagtcgggagtgctgattgatcagattgaaggtaaaatcatagggagttggagctgtcctcttgcgctgaatcagttcctrcgtggggaccacgagaccagataagccagtttatccatctgggtggtgccagctgatctgtcaactcagggtttacaaaatatctcaagccctgatcttaggttttacaatagtgatgttatccccaggagcaatttcaggaggttcagaatcttgcggccctccagctgcatgactcctaaaccrtaatttctcatcttgtggctaatttgttagtcctgcaaaggcagtctagtccccaggtaggaagggggcttgttttgggaaagggctgttatcatctttgtttcaaagttaagctgtaagttcctcccaaagttagttcagtttacacccaggcatgaacaaggatagcttggagattagaagcaagatggagtcaggttagatctctttcattgtaataattgtctcagttataatttttgcaaaggcagttttagttcaagaccagcctgggcaacagagcaagactgtatctccacaaaagataagaagattagctgggcatggtggcacgcacctgtagtttcagcagctactcaggaggctgagatgggaagattgcttgagcccaggagtttgagggtacagtgatccataattgggccactgcactccagcctgggcaacagagcagaatcctgtctcaaaaaattaaaaattaaaatgatctctaattagattatgtgagcccctaagtgactatatttgtgcactagaattagctaaagtgggggaaaaaaagatgcatttgatggtctagtcccataataaataacccagtgtaccataactactaagaaactgttcattaaattaatggatatgttgcgttcaagattgaaatcaaatgataaattctgtttgatatgtcctattcatgaccagccacataaatgcacgtattacttcgcaagcatgccaatgcaacattagttatatggaatcaaatgaagaaaaagaatgtaagttttcatatataaacatttcaggtaagtttttacttaccacacagatttttcatattaaagatttggcgactggttctttttacactgtgttyttattatatgtttatattatctcaggcacagatgttgttcatctttttctttctgcttataacagcaaaaaaatgtcagaagatttgccatatgaagtgagaagggctcaagaaataaatcatttatttggtccaaaagacagtgaagattcctakgacattatttttkamcttcacaacaccacctctaacatggrgtgcactcttattcttgaggattccaggaataactttttaattcagatgtttcattacaytaaggtaatgttaatgttattaatttataagttagcaaaggacttgtacttttaagtcaattatggatgtgagacaatcagaaaacagttatgagggaaggtgcaagagaaatggggtttattccatagccaggcttggtggttggggggaaagggtgctmccagaacacagaggcagtggtgagaggaaggagaaaaagagaggaaataagtaaaataataaacacaattaataaagtaataaaacacttgtggattcttgtgtctataaaattacacgttttatccagacagccaccagatggtggggtatttgttaaaaccaagtaaaattaatattaaaagtttaaatggtatggtcaatttgttaaaaccaagtaaaattaatattaaaactttaaatggtatgggatctcaattacaaggttttaggaaacttaagaaatagtcctttaacgtagactaaagcccagtgataaaaagattgcctccctttagtcctgccctcgtccccatttgatttagacaccccagaatacgtctaatctttcagtacttcataatcattttaaggctcagaaatctcagagaaaatttgctagaaaatagcaaccaaccagaaacacacataaggaactgtatgcttatttctgtgtactagatagccttccttcctgagagcraggatgattgagaggaaagagtgtggcctgtgctcagatcctgactttctccttcactaaccttagacaaaacacaccattcccaaaaccttgcctccttcattttataaaattggtgtcataacaaacaacacttacccataagggtactcaaagccttaaatgacataaagtatttaaaacatttagcctcatacctggcctatagtaaagattattatttttgtttcccttcagttttggacagtaactgggtagtggtcctggtaggagatcataatgtagcgattctttttttttttaattttttttaaattttattactattatactttaagttttagggtacatgtgcaccatgtgcaggtttgttacatatgtatacatgtgccatgttggtgtgcygcacccattaactcgtcatttagcattaggtatatctcctaatgctatccctcccccctccccccaccccaattcttcattgcctattgaagagagagcggaatgctttggttgccagatatggaagcagaattgctgacactttgttatccaaaccaagaggcctgtcttcaattttcatgcagataagcaggaggagggggaatcacccaacatctgtagagagctggaccacaggaatagaaacagaattgtttaagagaccaataccaagctaaatagttagtgtaaccagtgatgaaacaaaaatcaccacatccattaagaaagaacatttatttcatgttttttgatcatggttctggagaactatttaatgtayattttacctggaaagacactgtataattcaattgtatatgaatttcatattgtataatttatttgtatgttttcaaagctataataccattgggttttaaagtatttcataaagctgtcttaccaatcttagttgatgaagtaaaacgtattgaaggtattattgactctgttgaagcaaagagaacaaaacatacggtttttacctaagaaagacgtttttgatttttttcagacttctctggctccactaccctgctacgtttatctgattgagcatccttccctcaaatatgcgaccactcgttccatagccaagtatcctgtgggtaagtcatagttcccactgtcataactcaataaaatatgtcctagctgaaactcagagaaatttattttttatcttattttatttttgagacagagtcttgctctgtcacccaggctggagtccgatggtgtgatctcagctcactgcaacctctacctctctggttcaagtgattctcctgcctcaagctccctagtagctgggattacaggcatgtgccaccctgtaatttttgtatttttagtacagacggagtttcaccatgttagccagggctggcctcaaactcctgacctcaggtgatgcacctgcctcagcctcccaaagtgctgggattacaggcatgagtcactgcctggccgagaaaattatttttaaaaaaacatttacagctaccttccatatccttaggcttataattgtcaagtaacaagcaatttagctccaggcaggctctaattgtaccgaatttccccaatttcactgagcagctttctggttttgttcatgttccctttgctgtaatgcttggcccttctatttagtctggcacaattcttctcattctcaagattcagttcacctgtcmcctcctatagaactttccctgaccctcctctatagcattaattactccagaaatgtgtacatttgactaatatttatagtgtgcctaccagagaccaaccctgtgctaggtgcgggggacagaacaatgagcaagacacacagtctcccctcaaacagcttcgtatgygatgagaaaacagacaggtaaccaggtaatcactgcacagagtgataaatgctaaataggggcaattacaggagactggaagagcaggaaagacctaacccagtcttgatggatcacagaasgcccaaagaagtgggatccatcttgaggttgtgtatgtgtatgtgtttgggggaggaaaggaaaaaaattgagagcagtcaacaggattctagacaagtgtcttgaaattatctgtgatgaaaggccattgytgatttccaatctgctatagagcaatacttttgtaaaatgtaatttaaaaatggatttctagaaaaacgatcacatacttgaatattktagcaatgtcaaattgctataaaagtttctaaacacttactttaatttctgtacatatctcrcctgggaccagcagcagacaattggtggaccagtccctgtcctcagacaatactttgaggaaaaaggaatatcatatacaagggccccaaacccctaactgatgacatgccatacttgatacactgtgttctccatttatcttagcactctctgttccctatccccttctgcaggctgataatgtatgcttactaaatattagctcaaattaccagtaagtacacaattctaacttataaatgatcatcattcacagtagggttttgttttkttttttttctggaaaagggtctcactctgttgcccaggctgagtgtagtggcacgatcacagttcactgcagccttgacctcctgggctcaggcaatcctcccatctcagcctcccaagtagcttgaactacaggcacgtgccaccacattcagctaattttttattttttgtagagacaggatctcagtatgatcaggtctcaaactcctgattcaagcgatcctcccaccttggcctcccaaagtgctgggattacaagcgtgagccaccacacctgtacctcattcacagttttaatcacacctatcccacacagacttatacaaacttatccattccttcccatgcaggttctataactataaccatatataaaatactagccaaccaggagaatcgcttgaaccccggaggtggaggttgcagtgagccgagatcatgccattgcactccagccggggcaacaaaagtgaaactccgtctcaaaaaaacaaacaaacaaaaatactagccatctaacactggaaatacatacattcatgagcttgtccggagtgatcagatttgactggatcagaaaggcaagggatctgtttctccaaagtgcttgtgctaccagtgacctactccaggttgttttctgaccctctccttatcaagacctgtcaaagatctgagaaattttacccgacttacaagctaaccattagcctagcacctctgagtggatgccagtagaagacacaagactcctaaaacagagacaaagaatagattattgacagtagtaatagcagagtgtcagcatttctgcaccattacccaagctccagttcccacagggtgacatagagagagccagatggcagctatccatgccagtggttgcattctaggagggaacctttttttttttttttgagacggagtttcgctcttgttgccaaggctggagtacagtggcacaatctcggctcactgcaacctccgcctcctgggtttaagcaattctcctgcctcagcctcctgagtagctgggattacaggtgcccaccaccatacccagcaaattttttgcatttttagtagagacagggtttmatcatgttggccaggctggtttcgaacttctgacctcaggtgatccacccgcctcggcctcccaaagtgctgggattacaggcgtgagccaccgcacccggctgtgaaccttcatttttataatgggcagtaggcacgagtgccctttgctccagggaagaccccattcctaacttccaaggctgttcactatacagacatccttgaaaagatcatctggaacaaaaatagtccgtgtcttgctcatgagacttgcagatatgcagaagatccatgaagaatcctctctccacatccctcttaccacctgctttgcaatagacatttcacgagctgtttgtcatctattcacttgtttatcctgccagttactaggctgtgacttcatctttaccttctggtaacttccaacatgcagccccacactctcacacaccctctcaaacaccctctttcttctctagtccattctctttcttgagcgcctcattagcataattaattatctgcagactacactacaattaaaattacaacttaaaatattttttgttaaatctcagatggtttagccaggagtaatktaatttaaaagcaggttggcaaacaatataaataaattaaaatctaaaattattctggaaattcaagtagtgatacttttgtgcataataaaaggatctttatatgccatctttggtggccctattgtccaaaccaaaaattaatttttcgatacaagatctcatatcagagcagaatatttagattgtaggacatggctatggcagagtcaggggtggcgttgaatgaataataattacacaaatawcttycctaagtctcaaatgagaccacggttaatctgagaaagttaggagagggctgtgtccagtcgctttcccatatttgtgtgtgtgtgtgtgtktrtgtgygtgtgtgygtgtgtgtgtgtgatcataagagtggctgcagcaaactgcttctttctaggataaggtttgcctagaatgatcctgtcacatttcttcttccttgagaacagagtacaaaggtggtccttgtaggtgcctactagaagttaaagcaaaatttgtatgcagcaatattcttagtgtattataaaatgttgactcagaaagattgtctctctaatgttaaacatgcttttttcccagtgagtgcatgatataaaatattccaaataaaacagcaaagttggaaggagaacatataacatttctaattatttacratgagcttaatactccctcatattgaaatattttaaagatttggctcaacttgtaagggccaaacatatcagcaatgtttgttctggctaagagtagcattgcctacaaatatcatagcctaagattgatatttgagagtttggaaatcttaagcttttatttggtgtcacagagaaacaggatctgtatctcttattgctaagcctttgatttgtttcagctaattgcctgtatttggatatttagcttactctaattccttacttcaagtattgatacttttgtgcataataaagattccttcattcttaaatcattgactaggggattattatgattgacttaaactattcaacatttactcttgaaatggagagaaatttacctaccttgaagattggaagcccaactaatatcaggattctattagaaacaggaggaaagtgaaatggatttggggtaggcaaacgacaatgtattctatagtattcctacagacatatctacaaacacactttttcacatatttgtgtaagtcatttatgcacagatgcataccttagccacatttatgacaccatatacttaaatatatgttcatacatatatgcaagaaacctaagcacaacaaataaaaaatgatgcaagagaataagataagattttgtgtattgggaaataacagaagcgggtgaaaacaagatgagtgtaaaagaatgcagtatgttaatgggatggaagagaatgagggtagtgcagttggggtaaawggtttgccaaatagagaaggtgatgactggggagatgactttgtgggagacttgaacaggaaggaagggtctacaaaagtagtttaaagaaagagtattttgtagatgtaaggatggatgcttaacagccacacaaagtagacctaatagtacaggcatcatttcatatgagttagaagaaatgaacacaagttttttcctgcataaaattaaaaccaggccaagcacgacggctcacgcctgtaatcccagcatttggggaagccgagaagggcagattacctgcggtcaggagtttgagaccagcctgaccaacatggtgaaaccctgcctctactaaaaatataaaaataagccaggaatggtggcccgtgcctgtaatcccagctactcgggaggctgaggcagaagaatcrcttgaacctgggaggcagaggttgcagtgagcagaaatcacaccactgtactccagcctgggtgacagagtgagactctgtctcgaaaaaataaataaataaataaaaccattgcactattgtgttaggatggattgctaggttaagggcaaaatcattgctcaagggtcacatagattgtcatattgactgaaatccatgattcatctagtctggatttctgtgaaatctataaaaatagatgtccttcctcccgtcacagctaaatgttagatcttaacagtttctcttcaggtccacctattattttgtcagcataaacttgttcaccttttttactrtgttatgacttttaaatattttagcaatactgaaggaaatttaaagaaaaaagaccacaagagtttcctatttctaacaccactgattttttccatgttctttcccagtctttattcactatgcatctaacttaaacatgtaaatgttctgcttcacgttttgccaaacattatgtctcaaatattttccatgatgctacatggtttacctttttaataattttaacaacataattctaaatcttgatacattaaaatgcttagttttataatatattttcatacttatataaatgtgactatctctccttctgtacctaggtatagaagttggtcctcagcctcaaggggttctgagagctgatatcttggatcaaakgagaaaaatgattaaacatgctcttgattttatacatcatttcaatgaaggtaagtaataatgaaggtaacgttatcaaacttaaccaccaaacatttaaataacaattggaacctgggtcagatttgccatgctaaagatatgaagtgctttttaaaatttttattcacttcagctattccccaatggccaggatagacacattcaagaaaagcagctgccaaataaagactccacattaaatccttatttcctgctaatctccattttaaaaagaaaagacgagaaaatacaaatgcccagtaaacatatgaaaagatgttcaacatcactagtaattagagaaatgcamattaaaataagaagtcacttcccccattaagttgggaaaatattaaagtctgcaaatatcaagcgttggtaaatgtgtaggaaaaggggaaactctcattacctgctggtgaacatataagtgaacatayaagttggtaaagacattytagaggataatcttacagcatccacttcttaaaacacaccaatcttattacccagcgattccacatctcaaagaaacacaagcacaagcaacatgttgtttacaaagattgttatcgtgcatcatttataacagcaaaagaatggaaacagcatgaatgtccacctgttggtggagagttaaataaactaacatggaagaatcttcaaaacacaatggtaattagcagaaagcaagttgcagaccaagacattcagtacaccaattggctttaaaataacaataataatcatcaccttctaggatacatatatatgttaacacatcacagggaaagtcctagaagaaaacacaccaarctgataacaatagttaccggggacgggaggcaaaacccaggctaattttgtcttaattatattcaataagaataatgtatttatgtattatttctgtaattaaaaattaattaaacggggactggtggacaaggtgggtatatgcagctctatgcactatctgctcatttatttggtaaatctaaaactgcactaaaaagtctattagttataaaaaaagtttactttaaaatggaaaatagttgcttaaaatcaaagagacattctatgtaaacaattattccaacagactgagttgaaattgttgttgaggaatgggcaattataataacagagggggtgtgtacttcggtgtctgtggggagtgaattcctcaacctcagatcgtgcgcaccccactgcaatcacagacattcgttttgtgcttgggaatcctttgactccaaaatcatgaaaactgaaaatttgctttttaccatctttgtctgagggcaggttctatactgtctaatggaaccggttttgagaagatcacaacatacttacaataaaccctctgaataggaagtgtgggactacaatatattaagaagtgatacattcagatagaaggccacaaatctgggtggaaaacgtggttggttttcagatcatagtccatagaatcctatcacaacggtggagaaaagcagttcctggaacaccccaccccttaaccccttatctctgcttcaaccagagctcttctgtgtaacatttcatttaagcaaaggattcggcaaatcaaaaattgtcaaccacgattaatttagactatccagcttggtggattttcaactgagcactcctatccamagaatgctgacaaatgaatcatagccgccatgtgaaaagtctgaagaagtgtgtagaagggcttcattcttgactctgtcctactcagaactgtagttagtgacttggataaagacatatgcgacatgcttagctaagtgacaggtctcaggaagatagcaggaaaacatcctggttgagaaggcagatccaagaagtcctgacaatctttaacaattgtttaaaccaaatgtttaaggttaacaacatcagggaccaaagttttgttcttatgtttaaaaaaaatcccagaataagggaggtaatggtcttttttttctgccttgaataaacaacacttgagaactgtaaataaattctgagtccgtaatccaggagaaacatctataaagaggaatttagccaaggagagcattgagaatgttgaagagcttgaaaatcataatgagaataattcctggccaggcgcggtggctcatgcctgtaatccttgcactttgggaggctgaggcaggcagatcwcttgaggtcaggagttcaagaccagtctgggcaacatggggaaaaccttgtctctactaaaaatgcaaaaattagctgggtgtggtggcatgcgcccataattccagctactccgaaggctgagacatgagaatcgcttgaaccaaggaggcagagattgcagtgagccgagttcatgccactgcactccagcctcggtgacagagtgagactgtctcaaaaaaaaaaaagaaagaaagaaagaagtctacattagaaagaaattcaacacattttctgtgacccagagggcagaagagaatcaatgagataaagttatctagagacagaaatttttttcttttgttttcttttttttttttttttttgagacagggtctcactctgttgcctaggctggagtgcagtggtccaatcacagctcaatggagcctcaagttcctgggctcaagcaatcctcccacccagcctcctgagttgctgggactacargcgtgcaccaccacacctggctaatttctgtggtttttgtagagacagggttttgccacgttgcccaggctggtcttgaactcctgagctcaagcaatctgcctgcctcggcttcccaaagcattggggttacaggcctgcgccattgcgcctggcgagacagaaatttcttattaaaaaagctgagcagcaatgaaacgggccacactttttgaggctgtaagaagtcgtcttctgcatctgtaagatggccagaacaatacggagaatactcaaacatagatggaagttaggctttcaagactccttccaactgtaagtagcaaaaacatactcctttgtgttctatcagtttttactttcttcctatccaactttttggtttaaagaaatgagatctggtaagttcccatcttcatcttggaaggtgtggtagattttaattcttccctttcccgcgtccacatcctggcagtgtgatgtttcatatccttctgttcagagatagagtctatttttccacttctggaatagctggcttgcccatgtgaattgttttgtgccatagaagaggcttgaaaagcacttgcacattggagcttgctctcttcctgctcttggaaaccctgtacgtgtaccattatgtacaacagcccacattggcctgctggatartgaaagcctttgaggtggaaaactcaggcaccctaacagacagagtcatgcaactccagctgacagcccatcagacataacagtaaggccatcccataggatccagcctccaggtgagctgtcagcttaccacaaagrcaggagcaaaacaataaaaaaaatccacaaagccagtgtagacggaagaaactttccaaccaacccacagaatcatgaactaaattaggaggtggttgtttgaagccactaaattctggggtagtatgttatgcagcagaagctaactgatacagaagtgatcactgggcatacccattctaactctgctctaaaagcaaaggaaggctttcctttgagttgtgaccataacacgctgtgggccctacattggaccaaacgttcatcctgyttgctcagagatagcctggtatatgcataaactactccttttccaagtttctgggaattgggttgaggttgctgcatctttggaagttggtctccaccactggcaggctgcctgcatcacaagatctcattactcaggagctgtccaagtgtctaatgtacttagttaagaaaaagaggctgggcatggtggctcacgcctgtaatcccagcacttggggaggctgaggcgggcggatcacaaggtcaagaaatcgagaccatcctggccaacatggtgagaccccrtctctactaaaaatacaaaaattagccgggcgtggtggtgcatgcccatagtcccagctactcaggaggctgaggcaggagaatcgcttgaacccgggaggtggaggttgcagtgagccaagaccacgccactgcactccagcctgggtgaaagagcgaggttccatctcaaaaaaaaaaaaaaaaaaaaaaaggaaagaaaaagagcacgatactgaagtcacctcagttgctggaactcctcctgaaaatatgcagtcataaaacatcatagctggaagggtcctccaagataagctaatccaataccttcatttgacaggtcaagaaagcgagcctcaagaagttaagcatcttgttcaaggccgcatagccaggggattagagcccaggtctcctgacccctaaacctagattctttttctctcaaactggctttttcagttctgttttctacctctggccgtcggcgtgtttgtggacagagtgctgataggaatcattcaaggacatcttttggcctagtgctgtttatgaacatccttaactaaacgttatctgttctccccatagctgtcttcattttgttattgttgctgttgttattattgtttcttccttacattgttaacttccctttttccagatttttttttttttttgagacagagtttcactcttgttgcccaggttggagtgcaatggcttactgcaacctccacctcccaggttcaagagattctcctgcctcagcctcccaagtaactaggataatcccaacctgggtatttttagtggagatggggttcaccatgttggccaggctgttctcgaactcctgacctcaggtgatccacccaactcggcctcccaaagtgctgggatgacaggcrtgagccaccacacccggcccagagatgtttttagttgccattgatacatattgtttttgtcataggaaaagaatttcctccctgmgccattgaggtctataaaattatagagaaagttgattrhccccgggatgaaaatggagaaattgctgctatcatccatcctaatctgcaggtaacatttgttctttctttaaaatgttgaaaataataatgctgtacctttgaatagaagtttatagctcatacagcacttcgcgtacattcgcccatttgatgctctcattagacactgagtgtagatagggaagatgtttggactgtcgctcaataaatacttattcagtgtaacctgtgctggctgtgtggacacaccagtaagtatggcctrcacgctcaatggaatttatagtgtaggtacacaaaagtctaactttagtctagaaatgaagacagccagatgagatgacagaataatgagatgggagaggagtggtcagacaaggccacttagagaaagtgaaactcctacccacattcagcgggtgggaattatgatgtctattttaatataaggaaatacagggacggaagttagaaccttcccacagccatgtagctatcaatgacagatccagagttagtgctctttcaagttggccgcatcacttgctacctccctgtgacagaataagttagagaaaaacgactggaacctctttcttctgccaccattccccaactctcctcagaacccccagaatctactccttgcctagttttatcaataatgacatagtgaagaaggaaaaaaaaaaggctcttgagagaatgtaggaggtttaaatccggaaaaggcaaagggaaaaggagagaagaacagatttccaaagccaaagtatccattccccagtgcaagtggcctgcacactcccagacctcagagatggaagagaactggtggattatctagtccagggctttcaaccccgactaacctttacctagagagcttttaaaaaacatcataatagcaatggcaggactccactctgagatactctgatctttttggcttggataatcaggattgaaaaacactgattgatccagttcctatccctgtttagtgtctctaatagtcatccagacttgcaactgaatgaagtggcctgcccagtaatacagacgagtgaagcaaatcctgctttgtggcttaatgggacccaggtggaaacctgaagaagcagccttaggcagtgtttgtttttgtttttgtttttgttttttgagatggagtctcgctctgtcgcccaggctggagtgcagtgkygcaatctcagctcactgcaagctccacctcccgggttcaagcaattctcctgcctcagcctcccgagtagctgggattacaggctcacgtcaccacacccggctracttttgtatttttagtggagatggggtttcaccatgttrgccaggatggtctcaatctcctgacatcatgatccacctgcctcggcctcccaaagtggtgggattacaggcatgagccaccttgcccagccttaagcagtgttttaaaggaaaggtaaagactgggggagagaaaggaagaaagcactatyggtgacaaamatatcaagtacaagaaacagaggccaaggtgatgatatcatggcaggctaaaacaggatttttcaggttttaggatactcttgaggagtacaaaaataatcccaggcagacggagaagtgagatgaatgagatcagtagcaaactgggctagtggtaggtctcgaaagttaggaaggatggttttgatttgacagacaataatgaatggctcagtattctacaggagggattgattggttaattctgccaacaaatatttttgaatgacaactaagctcattctgggccttgagattcaagatagggaaggttcctcatggagcttccatcccaatgggtgaggagaactgaccatgaataagtaaacaatatgtaaaccaaatcatttcaaactgtaataagtgctgtaaaagaaatacacaaaataatatagcagagggtataacaaagggttccaattagayggagtggtcacaaagtgccatctcagagatggtggcactgaagttggaacctagaagatgagaagccagccatgtggaaggcaagtgagaggccctgaggctggaacaaacttggagcatctgaggaacagcaagaagacccatatccctggagaggaggagtgagcagaggacggtagagcctggagaaaacacagttcaggacccggttatgagtctagattttgtcctaagaatgacagttcttactaagggatgctaactggaatcacgtaggggaccccctcccagtgcctagaacccaccacaaactactaaagtagcgcttctcaaacttgagccacatgacaattatggggagctttttaaaaatgctgattcctggccaggagcggtggctcacgcctgtaatcccagcgctttgggaggccgaggcgggcggatcacgcggtcaggagatcgagaccatcctggctaacacggtgaaaccccatctctaccaaaaatacaaaaaattagccgggcatggtggcaggcgcctgtaatcccagctactcgggagcctgaggcaggaaaattgcttgaactcgggaggtgaaggttgcagtgagctgagattgtgccactgcactccagcctggacagagctgagattacgtctaaaaagaaaaagaaaaaatgctgatttctgagtcctcttcccaggggctctgatctaattcatcagggtgtagacagggaatcaattgagttcaccaggtgattttcatgtggctcaggtctggatagcactgcacaatgtcggaatctccacaggtggggctagccagacgtgtgttgaagaggttcctttagtgattctggggcaagtctctgcctgaaaaaccaccggttcagagaaatagttctcagccgagccaccctgtaaatcatctggggcctaaatacaataaacacagaaaacagtgaactataaatgggtagcatgagggattcgaggaggtggctgaaagaagcacgtatcctgatggcatggttgcgggttatatgactccatgctctgcaagtcagaactcatagaactgcacacaaaaatgagcgaatttcactgtaggtaaatttaaaaataaaatataaaaataatgatgcctaggccctcctctcagattctgatttgatttatctgaaatgggccagcccctctacctgtatatatgtatttaacatcccaagcgatcataatgtgccaccaggatggagaaaactgcggtgatgcggcacttcccaaacactaatgtcgtgcacgtgaacgtcaaggacctgttaacatgaagattttgatttggtaggtctgctgcgcataatgaaatcctgcttttctaacaggctcctgggtgatgcggatgctgctgggaaatgttagacatgcagaatcccaggcccccacccccaacctatagaatcagaatcttcatcttaacaaaatccccagatgatttacaagcacctcaaagtttgagaagaactgttctggggttccygtggtgtgacagccatggtgcttgagggctcaaaggtccaaatccctggtgcgggacccttcagataactcagttgttaccctaatgtaggagcacatttggaatacacccaccttgtcccagactctccccagcccagcaccaccttctctcaccaatccccgtcagaatagaatctccttgtatgcaggtacaacatggctcatttttatatttcccaacggtagaatgtcttgcacacagaagactcctaatggatatttcctaaattttgctgaacagaatttaacttgagctggcaacaggcagactatgcacttaggtagacatgcatttagttttgccttttaatattataaatctctttggctacattcaaggtaaacctggtattgaagcaaactcttttttatttttttttagagacagggtttcattctgtcacccaggctggagtgcagtggtgtgaacatagctcactgtagcctcaacctctgggggcttgagcaatcctcccacctcagcctcctgagtatctgggactacaggcatgcaccaccacacccagctaatttttcgtattttttctagagataggatctctgtgttgcccaggctggttttgaactcctaggctcaagcgatccacccacattggcctccccaagtgctgggattacaggcaaggagccactgcacctggctgaagcaaatgttaattacacgtttcaattatacaaatgcaaaggggaactcttaaaactactgccaaaattcacgacccaatgtcagcgcagtcagatcacttgcctgcatctcaatgcctcgctcaagtatctcttttaaaacaacagaatactgtaatttgttagttgtctagagtctgacataaatttttagaggagaaaaaccaaatataatatatttattttgattgtttcctgagaggwtcaagactggaaaccactgcatcctggggatcccatgtttttaactcttgatgggaagacgatcccactgggcrgagactgtaccgtgtacyycgtgtttgtgaatgmggccrcatattacgaaaagaaagaagcttytgcaaagacaactaaactaacgctcaatgmaaaaagtattcgctgctgtttacattrgaartcacttccagcttacatcttacacggtgtcttacaaattctgctagtctgtaagctccttaagagtagggttgtgccttattcaactgcatacatagctcctagcacagtgccttattcggtaggcatctaagcamatttcttaaattaattaatatatctttaaagatatcatattttatgtatgtagcttattcaaagaagtgtttcctatttctatatagtttattatacatgatacttgggtagctcaacattcttaataaacagcctttgtattcagaatataaaattgaaatagatatatataaagttatttgttttattgtgctttgccttactacacttcacggatactgtactttttttccaaattgaaggtttttggcaaccctgtgtctagaaagtctaacagtgccatgtttccaacagcatgtgctcactccttgtctctgtgtcaccctttgataatatttcaagcttttttatgatttatttattatatctgctatggtgatctgtgatcagtggcctttgatgttactgttgttaagtgttttggggcaccatgaatcgtgcccatgtgagactgcgaacttagtgaatgttgtgtgagttctaactgctctactgaccggccatttccttgtctctctccctgtcctctggcctccctgttccttgagacacaataattaataagtctacagcagactctgtgtgttcaagtgaaagaaagggtcatacttctagaaattaagcttagtaaggaaggcatgtcaaaagctgagacaggctgaaagctaggcctcttgcactggttagccaagttgtgaattcaaagaaaaggatcttgaagaaaattaaaaattctactccagtgcacacacacaaatgataagaaagcaaaacaaccttattgctgatatggagacagttttagtggtctggatagaagatcaaaccagccacacattaagccaaagcatgacccacagcaaggccctaactctcttcaattctgtgaaggctgagagaggtgaggaagctgcaggaagctgggagaggttggttcacaaggtttaaggaaagaagacagctctaaaacctacaagtggaaagcgaaccagcaagttgctgatgtggaagctgtagcaagttatccagaagatgtagctaaaatcattgacaaagatggctacactaaacaacggatcttcagtgtagttgaaacagccttctattggaagaagatgctatctaggactttcctagctagaggggagaaatgaatgcctagcttcaaagcttcaaaggacagcctgactctcttaagagctaacacagctggtgactttgggttaaagccaaagctcattaactgtttcaaaaatcctaaaactcttgttttttgttttttttttgagacggagtcttgctctgtcgtccaggctggagtgcagtggcgcaatctcggctcactgcaagctccgcctcccaggttcatgccattctcctgcctcagcctccccagtagctgagattacaggtgcctgccaccacgcccggctaattttttgcatttttttagtagagatggggtttcactctgctagccaggatggtctcgatctcctgacctcatgatccgcctgcctcggcctcccaaagtgctgggattacaggcatgagccaccacrcccggcccaaaaatcgtaggactctgaagactgatgctaaacctgctgtgtctgagctctataaatggaacaacaaagcctcgctggcagcacatctgtttgcggcatggtttactgtatattttaagcccactgttgagacctactgcttgggaaaaaaaaaattcctttcaaaatactactgctgattgacaatacaccatgttacccaagagctctgctggagatgtgcgaagagattagcattgttttcgcgcctgctaccacgacatccagccgaagcccatggatcaaggcgtcattgtgactttcaaatctaactatttaagaaatacatttcaggctgggggaggggagaaaaaagaaaaaaaagaaaggaagaaaaaaatcatttcataaggctatagctgccatagatagtgattcctctgatggagctgggcaaagtaaacagaaaacctctggaaaggattcagcattccagatgccattaagaacattcaggatccgtgggaggagatcaaaatatcaacattaacaggagtttggaaaaagtgaattccaaccctcttggatgactctgaggaattcgagacttgagtaaaggaagtcatgcagatgtacagcaagagaatgagaagtggagcctgaagatgtaactgaactgctgcaatctcatgatcacacttgaatggatgaggagtcgcttcttataaatgagcaaaaaagtggtttcttggctgcaatcaactcttgttgcagatgctgtgaacactgttgaaatgacaaaggatttagaatattacgtaaacatagttgataaagcagcagcagggtttaagaggattgactcctattttgaaatgagttcggctgggagaagtggctcatgcctgtcgtcctagcactttgggaggccaaggcagacagagcacctgaggtaaggagttcgagaccagcctggccaacatggtgaaaccccctctctactaaaaataccaacatattagccaggcgtggtggcacgtgcctgtagtcccagctacttgggaggctgaggcagaaggatcacttgaacccaggaggcagaggttgcagtaagccaagactgcgccactgcactccagcctggtggacacagcaagcctccatctcaaaaaaaaaaaaaaaaaaaaaatgagttctactgtgaataaaatgttattaaacagcatttcatgctacagagaaatctttcacgaaaggaagagtcaatcaatgcagcgaacttgttgttttattttaagaaattgtcacggccatcccaaccctcagtgcccaaccaccctgatcaggcagccatcatcaaggcaaggccctccaccagcaaaaagatcatgaattgctgaaagctcaaatgatggttagcttttttagcaataaagcatttttaatgaaggaatgtacatgttttagatataatgctattacacatttaacatactacatatagtgtgagcataacttttacatgtactggaaaatcaaaaaatatgtgtggctcatctgttataatgtttgttttattgtggtgatctggagccaaggctgaaatatctctgaggtatgcctgtaatgtataagtgctagtagaaatgagttgtgcagaattgctatttttttcaatttttatatttgggttaatggtaatatactaagcgtccagtctataaacttcagcattcgttgcgaaatccagaggagacttttaagtgctgttttgtagatgaaatatgaaagagaaacaagggcttaatggtaaagatgacatatgactatattaagaaactgaatggccctttgtccacaaacagtaacccacacagcattgctactgtggcatgcccactgctctgcactgacctcatggagcagagaacctccttcagacacctcacgcaccccctgaggagctaatgtttcttcccaacatggaaaatttggaagaggcctattcttcacagctgtcacttctcattttgaaagaatatgcccacccttattcccaggcaaggtgtgaggaggtctttgggctccagctgttgccagcagaggtggtgaaagtcaacaacagggcactggacacacatagaaatgtgacccacagctatggtttgcaaatacagtctttcaagaagtcctgccatgtcctaaatgcccaaatcccttgcctcccatgattcttctcctcaaaggaccttctgctggacgccgccccctccctctccagccccaccagggccctccccgccatcctcttaggccacagcagccaataaagagtgtttttattccatgatctgtacccccaatgaatccataatcatagtttcaaatgtatttaccaaaaatactaacattatctggaatgaatgaatgaatgaatgaatgaataaatattatatatttatacattttcattcttccaaagtgaaccccactatgccagttttactccatactcagtgttctggaaagcccatattctttctaaatttttcagcatttttttctatttttgtactttaccaaaattatttacattggaataaactctcttccttctgaattctgtagtaaaaatgtgatttatcagcttttgtacataagatttaccaagcttccttctcctgctgtgaatgttccgttgtgtcctatttctgagtccaatttttctaggtcagctttttccagatgaaaattttggcaagaatattcttccctcaaattttagttatttgtaaaatttacaatgtacaatttatatcactgtggtttcagtgggtttcagggttgattattcctatcaagtctaatcttcccttttacagtctttaaagtttctaattagatgtgtggttggtttgtttgtttttaatctataacatattgctgtgtggttttagccactttgagttttattttactttgattatttctaacaatctacatttgcatttttctcatttataaaataggaatgataataataatagtgcccctttcatggggttactgtgaggattaagtgggctaagacatataagcacttagctcagtgcttagcacagaatacatacttaacaaatcactgaagttcaaattcctagcacaaaaggcccttcctgatctgccctccctccccgacgcctccctacactcatctccctttgggccatctccactccagtgtccttcccactgtttattcctctaggcctttacatagactgactcccctacccagaactctcccccactgtcctccacctcccaccccacctcagactgcgctctagccaataatgcctttttctccttcaaaatgcaacccaactttcatttcatagccaacatggtcttcgtcgacctgactttgttgccactttgcccctccttctatcccatcttgagggcatcagcagtgtctttttcgatgtctacaatctagaaagtgaccaatagaggtgagttgaataaatgagcatgctcaaacatcccttctctactggaacatcttcatcttccaccaatggccctgcctttctttttatcttccttcccagtcacctcctgagaactgtccccatcactcccaagtgaaacacttcgttttacaccctccagactgttactatgtcccaaaggacagtggaaggaaaaaacaaccatttaagtctgcaaatccatgggaaaaaaaaaaggaaattttcttttcttttttttttttttttttttgagatggagtttcactcttgctgcccaagctggagagcaatggcatgatctcggctcaccgcaacctctgcctcctgggttcaagcgattctgccgcctcagcctgttgagtagctgggattataggcatgcgccaccacgcctggctaattttgtatttttttagtagagacggggtttctccatgttggtcaggctggtctcgaacccccgaactcagatgatccacccacctcggcctccaagagtgctgggattacaggcaggagccgccgcaccaggctaaaacaaggaaatgttcacactcaacaattcccctgtttacaatcctttggtggcttcttacccttgttatgagatctcaaagcctcaccacggctgtccaagtcctacatgcactggcctctgcccacccctctagccttatttcatgtcacttggccccttgctcccagcaatttggccacataagacttctccagtcctcagatgcacaaagttccctaccacctttgcccacattttcccacttactgaaacgcttccccatctccacacttccattagctaaatgacgctactcttaaacatgactcaggctaggttaggccactctgttatacaagctcattgccagtactagactggcacttacccaaattgcaaccgtaatgctttatgacaccggggcaggtgaagttattgtctgtctctgattaaactgcaaaagctccaagaaagcagggatagcatttgtcttattctttgtcgtacacacagcacttcacgcatagaaggagctcagtgcgttttgctggataaatgagagttgctctgctgagtgtgaagctatctggaagggcttctttggaagagcgggttgtcacttccctcacaagggtgaccccaagatagccactggagaccacagagagtgggaatggtgaaccacatacaggcagtgctccaataggaggagcaaatgaaaagtggcagctggggaaaccctgaagcctgagagtcccatgggggtgaccag

SEQ ID NO: 95567 - DNA, 16862 bp, Homo sapiens
acagccagaggctcagatcagtcactcgtctccaacagcactgccctggccgacttcctcaggatcgcagcatggactcaggagggctgccatctggcagggtctgtgctgtggcagctcaggttagagcaacaggcctgctcctgccacctcagaagcacttgctagttagtcaaatgttatggcgcccttcagggggcctccaggtctttcacgtcttggaagtgtggcaacacattgggatgtgctggaggaagaaggtcaccctcggctctcagtgcccttctttagggcagcagctgccctctgaagatttggatgaattccaagaaagaccgtccttcgtgtctttcacctccgcgcctgctccctgcccctcagccttgtcccgttgcgtgcatgctgtccccgcctcagcaccatcctgctacacgcatgctctccccacctcggcaccatcctgctacacgcgtgctctccccgcctcggcaccatcctgctacacgcgtgctccgttttccgtgcctcagtgtcacgtttgtgtttctggttcactgtgctgttgatctgtgtgttacatcaaatgcagtttgttctttttacgttgctgtgttgtatttcctggtgtgcagaagccacagtgcgcttatccattctgctcttgaaggacttgagattgttttcagtttgtggctattagaagtcacggttgctatgaacattctcacacagatgtccctgtggacagttcccttggatccgcacctcccagtgccggctcacaggctagatgtatgtttcatttcagtggaaactgcggaagagttctcaaacgtggctgcatgtttcacacaccccagccccaaatgtggctgcatgtttcatacgcccccagccccattctgctggtaccaatttactgtattagtccgtgtgcacactactgataaagacatacccaagacagggaagaaaaagaggtttaattggactcgcagttccacatggctggggaggcctcagaatcatggtgggaggcaaaaggcacttcttacatggcggtggcaagagaaaatgaggaagaagcaaaagcggaaacccttgataaacccatcagatctcatgagacttattcactatcatgagaatagcacaggaaagaccggcccccataattcaattacctccccctgggcacctcccacaacacgtgggaattctgggagatacagttcaagttgagatttgggtggggatgccatcaaaccatatcaggagtccttaaatttgttaaattccccacatgtctcctcttctggtgccttcatttgtccctacagaggttctccgcgaagcactgtgcttcccccaacttgtttcccttcagcctggagaacttcttttcaatagttcttgtagtgcagctttgctgacaacaaatccctcaattttgtttcactgaaaatgtttttattgcaccttcccttttcaaaaacagctctatcgagatacagttcacacaccgcaaaattcattattgtaaattttgaattaagtagccattacctcaaaccagtgtccatttccccccattcccagcccctggcaaccacgaatctgctttctgcctctaggatttccttgtttgagatggcagcgtgtgcaaatggggcgtgtcacactcagtcttttattccagcttctttcacttgcaggatggttctgagtttcatccatgttctactgtgtgtattaataacttgttcctgaatagtacttcatcatatggatataccacattttcctcatccattcaccatctgatgggcatttggactgtttcagtttggagctattatgaataatgctgctatgaacatttacatataaatctctgtagacattcattcatcttacatagacacagagggatagaattgatgggttgtatggtgactttctgtttaatgttttaagaaactgtcaaactggccgggcacggtggctcacacctgaaatcctagcactttgggaggccgaggcaggtggatcacttgaggtcaggagtttgagaccagcctgaccaacagggtgaaaccctgtttatactaaaaatacaaaattagccaggccccgtggttcacacctgtaatcccagctactcgggaggctgaggtaggagaattgcttgaacccagggggcggcgattgcagtgagccaagatcacaccactgcactccagcctgggcaacagagcaagactgtttcaaaaaaaaaaaaaaaaaaaagaaaagaaactggcaaactgttttccaaaatggctgtgttgctgtacgttctcatcagcagcgtatgagagttttcatttctttacgtcctgccaacacttgtcactggcttcagtttgcgtttccctaatgactactgatgttaagcttttttttttttttttttttttttgagatggagtctcactctgtcgctcaggctggagtgcagtggctcagtctcggctcactgcaatctccgcctcctgggttcaagcgcttctcctgcctcagccatctcagcagctgggattacaggcgcacagctccaggtccagctaattttttgtatttttatagagaccaggtttcaccgtgttggccaggctggtcttgaactcctgacctcaagtaacctgcctgcctcagcctcccaaaatgctgtgattatagccgtgagcccgccgcacccggccagatgttgagcattttttgtgtttatttttacttttttccttttaaattatttttgcagaaacagagcctccctatgttgcccaggctggcctcacactcctgagctcaagggatcctcccgcctcagcctcccaaagtgccgggattacgggcatgagcactgcacccagtgctgttttttacgttcttgtttgcatccgtatgtaatctttggtgaactgtctaatgaaatctttggccatttttaaattgggctgtttgtcttcttactgagttgtaagagttctatgtgtattccggatacgagtctcttttcagatgtacggtttacaaatatttcctccaactgcagcttgtctttttattttcttaatgtgtcttttggagcacacattaattttgatgaaattcattttataaaaaaaattttaaaaataaattcattttatcaatttttaaactttatagattgtgcttttggtatctcatctgagaagtctttgccaaaccacaggtcatgtcatgaagatattcccttttgttttttcttagaagttttctagttttagctcatacgtggaggtttctgacccactttgggttaattttgcatatggtgtgaggtagggtctaggagtcaccttctgcatggagatattcagtgtgtcagtgccatttgtgagaaagattatccttttgtccttttccctattggggacttggtttctttgccaagaatcacttgaccagatatctgtgcattcgtttatttctggactctccattgtgttttgtgggtctcttgtctaatcttacacagcatcacactgtgttcattacttctggtttacgtcagttttggagttgggaactgtgtgttctcacctttaatctgccttttgaaatttattttggatcttctgggtcctttgccttttcgtgtaaaacgtaggataagtgtatcaatttctgcaaaataaagcttgccggaattttgggaagattgctttgaagctggagctcagtgtgggaagaactgccatcttcacaacatggagtgttcccgtctgcgagcctggcctctctccacccgcttatctgttcccctccctccctcgatggcagtgttgtgggtgctgctccgcggtgctgctgtctcccgcactctggtcgcctgtgtctttgctttcccgtctgtgggtcagcctagatcacccccgttgactgtgtctgacttttttcctcttttctgctgcgtcttgtttgttattaggtctattgaatgaattcattttggatcttgtgtttttcagttttatgattttttgcagttccacttctctttgcaattctccatcttccccacgttgttcatcttttctttgaaattccttaatctgcttattgcagtgatttgaagggccttgtctggtgattcggacgtttggatttcctgagacttcttcccttcagttggggatcacatctttgtgtccttacatgctttgtgactttgaagggttccagtctttgtctttgaaagaatgatattatttcttccccggagattcctgcctttctctgccaggcagctgcggtgaggcactcgtcactgcagtccagtgaggagatgagatgggctggggctggactgtggcatcggcatccgtcgaccccagtttcaacgccgtgtgggcgagatctgtcctgtgtgtcctgggcctcccttaggtgctgaccccacagcacgaagagtgccctcctccctccgccacacccttcggtgctccgtgtggaacaccgcgggtagagagggccatggaaggaatgcggctcaccagctcttcctgaagctttatgggcgacgcgagaacccgctaacgagtgaggaacttaaaacgtatttatatgtaagcaagaaatgtttattatggagtaaaatataaaattcacatgactcttttaaataaaagacttcacccgttcgctagtcactgcatgcctgtccatactgggaagcatgctgacttcaggtctgcgggcagccaggccctcctgccagcttccccaaggtgtacatccgccctctctgtgtagctggaagagcctgaccactcacgtctctccaggccacagatcccgaagcccttttctagctctgttcacgattgctcttcccctcacaggccagacgcagctgtcccgcgcaacatggcttctgtgggaaggggtcagagtttgaggcaccccttttagaagggaggcgctgcagactcttgaatgtgaaccatgagaacgctgtgcctggagccaggagcctccgccacgggccccagtgcctgctcatcttcctaccgagtgcttcctttccttcgtaggtttgggaaaagttcttaagttctgaaacgccgcggatcaatgtctttatggcagtgcctacaatatacaccaagctgatggagtactacgacaggcattttacccagccgcacgcccaggatttcttgcgtgcagtttgtgaagaaaaaattaggtaagtgaaaagagcccactttctcgttcagaaagtcttaaagatcaacagatacgacttatttctaataaatcactcctactaagttctgggaagcagtgctttccatttcctttcaatgttccctctctctctacccgtctccgtctctacctctctaactgtctctctctctctctacccgtctgtatgtatatctgtaatctcttccacgtcgatagctgcctggattctgtatcgctctctctgtcacactctgtctctctatctctctctgtctctctttgtctctctctctccatctctccatctatctgtcttctctgtctctcttgtcagactctccatctctgtcttctctctgtctctctccatcgctcttcatctgtctctccgtcttctctttctctatctctcctgtctctccatctgtctctatctctccatctgtctttgtctccgtctgtctgtctgctctctctcctgtccgtctctctctctctctgtcatggcgtctgaaggacaagggtgaggacagtgagctgacccgcttgctcctgcttcatctgcccacatgtcccacggcgcctgcctctcctatgcagtctctctgccttcgtgggcagccctgtgaggcctcctgcctggggcacgttctgctgcttttcctctcagccccgctcctcccctcccagctccctggataaacccctccctcccaggacaagctggtcttttgggccacccaggggcgtgtttgctctgcactctcccatgaacctgcaggcgtgggaacgtttcttttccctcgtggctgttgaggtgtggttcactaactggaaacgcacacgtgtggctcagtgagtcttcacacgcatcacaggcccgcacctccagcagagtcgtgggtggggtattttttctttttgtgagagggaggggtggcgtggagggtgcactgcaggaactgaaggctccactgccatccagtttccagtgggatgtgtgtgtctgtggctgccgcgcgctcctcccagtccccaggaagtgcacagggaagcggcacctttgttcctggagagaattccgggttgtccaaggcacatgtctgaaccgcttcgctctctttgccgttcccttgccccttttctgtgaggccaccggagcccatggttttgctgctgctactgctgggataccctggggctgggcaggccccaagctgagcagggtgagcacaacgttttaccaaatctaaggaaccaagggcaagaacgaggtcagtgaaggagaggatcaggtgatttctggggtgacagaggcaatgagacctcggccatctggatctcccagcgggggtcctgtcagtggtgcctcctcgtaaagcaggggcagcagcagggaccactccgctcagaccgcaaacaaaagcgccttccctactgcccgtgaggctgcgggaaatgctgtgtgagagcgcggggactcggagttctcagggcccgtgttctcctgccaagcctgagctgaccctgtgggccaagatggctgcagttctgcgggtggttctgagccccttgggtgtgcccggccccaccccttgggtgccgcggccattcacccatgtccgcgttctgctgcagagcctgcaagctgagccggctgtagtccccggatgtgcctggccgcagcctgcagcgccgtggctgttcacccgtgatcagctccgtggtcggcagctgcacggtcactgctgttcttgagcgtggttgtgaacagcgcaggaactttgcaggggacaccgcggaccctaagcacattgtttaccctcattagctgttggacctgcttccttctaaaatacacccaacagatcgttttcaaaaaacaaagtcacgccgtagcgcagactgcagcgttggtcccgggtgtcgcacagtggtgctgtacccacggcctggggctcctgcactcgtgaaggagctgccacttttgcaagcaagggccgcstcctgaggggctaaacctgccacctttgcaygcgagagccacgtcccaaggggctaaacctgcctttggttgtgccgcgtaggctgatggtctcaggctcagctgccctgcccctcccagtgctggagaagtggaagaacatcacgggccacaccctgctggagcggtatggcatgaccgagatcggcatggctctgtccgggcccctgaccactgccrtgcgcctgccaggtaygagcacttcccacagctgcgttcctcttccactgtkctctgagccccccaaggtgggccagtctcgaaccacccacattcggactgaagggcggcatggaggatgctcccccrtgggacaggccactcggccaggagagcactcagratgcactgcgacctgtcccctctgggtagatcagccttctcccaagtctcagtcgggtggatgggggaggtgtctgtgctggcccctggctgkatgactggggagacaatgggaagaacagcaatgcctggaatgcaggcgtcagtgcatgtctcagaggaaggcggggggccatgctgttggctccagaccacatcagcagtggtggcagcctccgtctgtctggagtccgggtgccacacagcgccagcagcagtgccaggagaggtgggtgtggtgggcagggtgggatgagtcaagcacctgtcttccttctctagatgtgggctcctgataccgggcccctcttgtccagccttccctaacacatcccattctgactttcatctgacccaaccatttgagccctgggtcctccgctgggacttctgggaacagagcccacagctggggggccaccctgctgctttctgcgcagcccttccagtctgtctagagtagaagagagatctcagtgcagacttaaagtgagaccatcccgcacatctgtctgtgcagctgcttacctgcagacccagtaaaaattcacccctctggcgtgcagctctgtgtgtcttaagaaacatcatcacagtcaaaatagagaagggttcctcgcctcagaaactcccttcctagtgctcagcacctcctccacccccgaggcctggccccttgttcctgtttctcttcttgtggttttgctttttctgggaggccacgtggctaaatccttgcaggacgtggcctctgagcctgtctgcttccgcccggcttccgcccacagtcaactgcctgtgctgtgygcgtcagagcccgcgcctttccctgctgagtggcatccgtggtgtgggtgcggcaccgcttgtgaccctgttttaagcaatgacacgtgagatgttatcaacatttgtgtgcaggtttctgtgcgaacgtggttttttatttcacctgggcagatacctaggagagagattgctgtgttgtctgaagctttcaagctgttctccagagcggctrcaccatccccttccccctgcaatgggtgggaggtcacgagcacctgctgctccagcgggcggtggtggtgtctcgttgagttcatgattctctcatgatgggtggcgttgagcrcctcttcctgttcgtgtcattccgttttcaactggggcctttgttttcttgagttttgagagcttttaaaattcggracccaagtgtcagctgtgcgattttaaatatcatctcccagcttgtggtttgtcttcccattcacctaacagcgtctttaaaatcaggagttttaggttttggcccggtttatcaatttgttttgtgaattgtctgatgtcatatctaataaatccttgcgtagcccaaagtcacagagaatagtttcagctcttacgtttgggaccatgatccattttgagttaatgtttgtacatagtgcgagatacggaccacagttcttttttagtgtgtgaatgtctaactttttagcactgttcgttgaaaagactcccttctccatcgaacagccctttggatctttgttgaaagtccgtcgactcctgaggggtcggctcctgggctctgctctgtcccattgctttccgtgtgccctttggctcattccatgcctgcttggttcctgggactctagggtaagcgtggacatgggggttcaggcccaggcagggaccagctggtgccaggcagcgatacggtgctggggcctgcaaggtgagtgtgagggctggctggctgctgggctgggaggaggagagactgtaggctcacgcccctttgctgggcctggggagccatgggggctgttargtgtattctgagtgtaaagtctcggtttggctggggcatcctgagcagaatgacagggccatggcagcgagatcctcagctgccgtgcagagctgccagtggggtggccgcacagagtgcagtgcctgctgcaacagtgcccagggcagtgggcgggtgggggcatgttgtgaaaagaagtcagtgtgagtgatgagaaatacatcctagtctcagaccccaggaaaccgccgtcagtgctggtggcccctgccctgggccggctcccgcrttagtctcagaccccaggaracctccacctccgtcagtgctagcggcccctgctctgggctgactcgcgcatctccacgatggctgcggcaccagctgtttcttcggtggctaaagctctctggtggaaataagatggggaccttgaaatcaaatgtgactggtctgttgagtctctgtccttatcgttgtccttcttagtaggatgtgctggttttgtccagtgccaccggccacagtcaccacgtaatatggacggaatgagcaaagcccggctcgctgaggctgcaggctgcaggcaagtgaggactgaaagggtaacgggctctgggctttgtcctctctttgttccggacatrtgagcaggacaagttctgtgtattcagaatctgtctgcacagtttgtagttcatgatgactgttcatccacagcattgctttgtgggcgtcctctcttttgatcttctcgaaacagcccctgcgatggggtcatattttgcactcacatacaagaacccatgagcctgcccacggtcacgcggctggtgagtgatgcacttcccaggagcacggtgrcctcttcratggccctcactagagaagatggacagtgcccccctagccttttttactggaacagatacaaggctgagaagctgaaatcaggagcagcccagggaccactgtctacaccgagggagtcatgagcagcccagggaccactgtctacacccagggagtcaggagcagcccggggactgctgtctacaccgaggrtgtcaggagcagcccagggaccactgtctacactgagagcgtcaggagcagcccagggaccgccgtccacaccaagagcgccaaggagcagcccagggaccgccgtccacaccgagggcgccaaggagcagatagtagcccagagacccaggggaggctcascttccccacgctggaatcagaactcctaggcgaacaggaaggagccccagacagatggcacagggagaggagtccccggctgaggagggggatccagagaccctgaagcttcagggttattgggcaagaaacctgagtgcaccaatccccgagtcttcagctaccgacggcaggttccctcgggtgccggggatgctccctcttctctaaggcagagcccacagtaggttccctcaggcgccaaggacattccctcttctctaaggcagagcccacagcaggttccctcaggcgccagggacgttccctcttctctaaggcagagcccacggcaggttccctcgggcgccggggacgctctctcttctctaaggcagagcccacggcagattccctcgggcgcyggggacgctctctcttctctaaggcagagcctgacggcaggttccctcgggcgccagggatgttccctcttctctaaggcagagcatacggcagtttccctggggcgccggggacgctccctcttctctaaggcagaatcaaatatctgtgattttatccttgcctttaaatcaccagcagtgtgagttctttggtttggaaaaaagtaagtaaagtcacctcagcattaaatccaatatgccccacaaaaactccaaaatgcagcctcctgagccatgtttctagagggcacggtggaggagagctttcctcactctcaggctctaacccccaccctggtggccatggccttgacccttgggtcggctctagccacaggctctgagctcatgcttggcctcgctgctcagtgcactgtccgtgctcggaagagagagagagaagctgggtggagggtgagctctgtcgtgtgttatggttacgggcctgctccgtgcggttcctgtggagggagatgaataattcatggccgaccactgctgggcctcgtcacactctaattggaggttgagctcagaggtgctcacggctcctgggccactctgtggcattgacagggagctccagggcctcattggcggtttccgttccctgggtcccagtccccagtcagagttatcagggaggggctggctgacagcgattttagaggtgggctgtggcaggaaggcagtgccccccacctgcctgcagctgcgctcccatctacattggcctttgcggggccagcctctgtccactctcttgagctctcatgtccacactgtcacatgcccggggcacagcgagcggcacctggagtgtggggacccctccctcgagctctcacgggtggcacctggagtgtgggggcccctscctcaagctttcatgggtggcacctggagtgtgggggcccctccctsaagctctcacgggcggcacctggagtgtgggggccactccttgagctctcatggacaataccactgcttggctgctgcagaatccagacaccatcccagagcctcttcagcctctgcagatggtgtgggacggccacacggcctccccacctgcggcccccgcccctaccccagccgtgccgtgtccttgcgctgcgtccccgccccagtagaggcatcaccaggaagaggcgaaaggccgcctgtgatggtcctcttcttatgaaacgcccagaacagaaaaaccacggacgcggacagcagacctggtgccaggtctggggagggagggtgtggcggtcgtgggctgtgcgggagttctgactaggggaagtggggggctgtgcaatgtgtgtgcggaacaccgccgtgccgcgcactgaaatgggaagtcatgtgttatgcgggtttcacccccatttaaaaatcttcagaagcaaaacataaaggaggagaaaggatggaagaaagggggctgaagctggccccgccacaccccccatagtggtgacacgggtttctgaccagagtggaggttcggggcgtctgcatacctggaaccacagagaactcccgaggtgacactccgcacaccacactagcccggcttcgcctgcaggaccccaggtgtggacaggcccagcaggatcagcaagaccgagccgggcaccgacagcccctcaccaagcgtctggaggccgggacgccccatggattgcagagttcactgcactgaccctcgatgctgacccttgaagtgccggaaatctcagcgtggactcagacatgataagcgttcaggcactcccctgacgcaggccagggcaaaggcctcacgccccgggatagacaggaagtcccacgtctgctctgcccctaggtcatgcccgtgctgacgccacatcgccagggccgcactccatgagcagcctctgccgtcccaccagcaacctaaaccacaggcagagcgaggctgcggcagccctgcatgtgccggcgggacacgtctcgccacctgggctctgcccccaccccggccagtgtaagatatgattttagccacgttgagactgtgcaggtgggatggatacactgagcaaatcatgggtgtctaataaatgagccagtacaaagtgtggtccacctgccatgcagagttcaggacagcccctcctggggacatagggcagatcctgccttagcccgtcgtgtgccgggcacacacaggtcccctcatcgtggacagccccggggccatcagggcaaggcgccagccctccctggccagcaagtgtgtaaaagtgggaatgacaccagaatctgtgggcagctgtgaggctttgggaagtaactgggaaagtgatgtatgaggggcccagggcaggccaggcccagcgtgccacgtgagtgcctgctgtgccacatggccatcactgtggcatcggctgggcctgagcacaccgtgcttgccagccacgtatcgtgtggcttttcacctgctggtgcctacaccatcttctctctgggtcacagggcacgtcgctccctccacacagactcccgcacgtggcacacgggagctcagcgggatccgagctcagtgtgtgcttctctcctccaggttcctctcactccagcctccccttcagtgtttctcctctcctgtaggttccgtggggaccccactgcctggagtacaggtgcgcattgtctcagaaaacccacagagggaagcctgctcctacaccatccacgcagagggagacgagagggggaccaaggtaagccactctgctcttggcaggtgggcggccgtgtgtccagtctaggccccccacggtggttacactggtgcatctttcccctggaggcagactcccctccacgcaggggaccagccccctggacactgcaggtgctggctggtgttgcaagggcactggctggtgttctgggccctgcctgctgcgtgtccgtctgtgcgttcacagagcagtgggcagagggagcccagggcggaacgccaaagggactcacacccgggcacacagctcctcccaggggccctgtccacggggacaggctgacgtgggccatgatggccttggctaagcggaagagataaagagcagaggccgttgttgttgatgggaatctggttagaaatatgaactggcctgaccctggcacccgtcctgaggggacgctgaccacaggcccccatagtaggtgtggggagattcacggggccctgcacgcggaggtgggcgcctgtgcagtgctctgtggctgcctccttgtcttgtgcgttattctaaagctgacaagggtgaacaagaacaaaggacattgtctcatttctgtgaggattttaacatgagagtctgctcatcacacgtgaactcatcacagagaaaggtttagggattatggggaaatggaatcttgatttaaaaggaaattattttctctgaagccagtatccacacctgataccacacatgattgactgtgttgccctgaggttttcaaagatcgagggatcctgagtctcatctctgtgcatttccttctctgtgacaccatcttggccctcacgggcacaactgagctccctgtgcagaggctgaggggccgtgggccttgctctcgtgagtgaacagccacacgccctccttgtaccttggtttccacacatgaccacgtgagggttggagcgatggtcgtggttggacgttttagctccagcaaccaagtaggatgtgggtggctttcagtgtcattaaatgacactgaaaggtgcagtggccgcaccttgtgtggagggccacacggcgtgtcccgcctggcctgggccccccgcagtgggctgttatcccccgtggccctgaagtgggtattctgtttccccatggaaacctctcacctggggccacctgcagtggccgcaccttgtgtggagggccgcacagtgtgtcccgcctggcctgggccacccgcagtgggctgttatccctgtggcccccacagagccatggggcaacttgctgaaacccacctgggtggctgccccttgctatacccacctcccctgccctctgtagggccccagcccatgctgttgtcctgacatgcctctcctgggattcctgcctctgccctgctggtactaggctgctggccacaccccacatctcaggttcctgaatacaccggcccttcctggctctcaagtctgtgccctgcagtgcccctgcccccaactcgaggacctcccagctcagccagttccaaccctgtctgcagggacggggctcagcctgtgcctgggttggggacaccatctagtcagaaatgtccccagcagagagcagaacgtgagtggcgtgtggaggagtgagacgccccgtggctgtgcagccctctccaggtgtcagtcagctgacactcctgcctctgagcacctgctctgccggaaatggcagaaatgttgccagagaaaggggcggagcgggggtggggagcatttctgtcttaaattaaaacaaaacttaactgcttcacacctgcattggctgccgcgccacctgattgctcctgcctgagtttctttaattatttgtgtctgctggtttcttccctgaagcagtcttgaaatagaagcagcagcctcagctacctgggcaccctgacagtcagagacaccgcacaggggcctctgcgacaggcatgcaggcagaccctgcaaggtgaagccgcacagatgctctggggctgcttaaatctcagcgtacrgggggtttgcatctgctgacagcaggcccgggaacatttccagttcagccaaggagtcggtgcagcaggtggagtacagctgccctgcggggcctggctccaccaggggccaagacccttcgtggggaggagcacagcctgagggcctcagggtttgtgccctccgacacctgagattcagggctcccagaggggtgggtgggcgccccaggacaaccaggtgatgatgggcgctgtgaactctgaaaagccccagcatcagagacctgctgctctctcatgtgaagggactccccaccccacgctcacactcgcagacgcacttggtactttcatctgagtctcacgcagtagcccttctctccacagcatcccagaacccgagggtgcccctcactaccacggtcccggatccacgtggctcaagtgaggctgtggctgacagctgggctgtccgatccactcttgtctgtgccgaggcgtgggtcccggccagcgtccctccccagaaggtctccctcaggactagtcatgagaatggccatccctaggcctgtggagtgactcatgactgttcctgggcagatgatcaaccaggccttcagagctgaattaagaggcttggtgtcatatttgtcaggaaacagaaagtacctgcagaaaggaatgtgccctgtggggatgggaggacaccttcccaggatcatccccggggccagagtatctggaccctcaccaggtggcagctggcctgccaggcccagggctcagcctcctccatcacctcgctgaggggctggctcctaccactccctcacatcctgtgacatatcacaggtatcacacacacatgcagtgcgcgcacgggtatcacagatacacgcagtgtgcacacgga

SEQ ID NO: 95568 - DNA, 28307 bp, Homo sapiens
cacccccagcacacacacacacagcacttagcaactatgaacacatttgatgagaaggttagaaaggacttggggaggtggacattaggatcgctgagaaatctggggaaggaagcttgctaagccttcctggaggttcacctcctcgtcgtccccttcaaatggtggagtcattggccgatgctatgtcatgcagctggtggcggaaggagagtcgggctttcctgctgaagtaggcaccaggccctggcgagggtacccctccctcagccatggtgggggctatagctggactgggatctggaggggcagcaggactcaggcctaaaagattggaggaagaaggaagttgtaggtcagggttcacctcctccctcacccccaacccagggttgaggagggaagaagcaagggaagacacctggggcctgggggctggtgaggagtgttggtggcagcagcagggggagggagaggggctgttgcagagcaagcaggactggctcgcacacatgtgacctgtgcagttgcataggatcctccgactcagaagggccaccatgcttggcataggtctctgctgtcaccatcttgaaattcttaatttttttttttttttgagacagtctcactctgttgcccaggctggagtacaatggcactatttcggctcactgcaacctccgcctcccgggttcaagtgattctcctgcctcagcctcccgagtagctgggactacaggcgcccgccaccacacccggctaattttttgtatttttagtagaggtgggtttcaccgtgttagccaggatggtctccatcccctgacctcgtgatctacccaccttggcctcccaaagtgctaggattacaggcatgagccaccgtacccggccgaaattcttaaattgttaacaaggggccccacttggtcatttcgaactgggccctacaaagtatttagcctgtcctgtgaggacttcggtgatccatctcccacccagggagacagatgatccttttccctttgctggtttgagcatttctctccctgccatgcagttgtctctctgtctgcctgacagccccgctttaccctcagtctactccatacctgctcctctttcagtcccccgctgcctccggcacccgcaccatgggaaacaccatgcccccttcagacccatctcaacagtggaggcgatcagagctgggaatggccaggagggcccccgggagaggggtgtggtttccaagcccccccaccatgggcaaaactaccacttagcctcagaccgcctggtgattacaggcgccagggatggaaaggggagaggagggaggaagaaaggggtgggggtacactcccattcagacacctatttttatgccccattaatttgggggtcctttctgatccccatggagaagcaggaggtggttgggagaggtggcacggcagggacagacgcagaggtgctgtgacagacagatgcagtcacatttcactatggcaatgcccgacaacttggcgccaggctggacaccgctggggattcctttgtattttagaatgagaattgaagtgcccaagatgtaaactttcaaagaatactctatttttttagaataagaaactttattattcagggaaatgttagattctcattaaatggtctgatagttcctgtcccctgttatgaagatgattgtaattgattaattatgctgtgtcaggtaaatgctagagacttttacatgttgtctcatttcacttaatcacgtcaaagatcttttttttgggggacagagtctcactctctcgcccagggtggagtgcagtggcgcaatctcggctcactgcaactctgcctcctgggttgaagtgattttcctgcctcagcctcccaagtagctgggactacaggcgtacaccaccatgcccagctaatttttttgtatttttagtagagacggggtttcaccatgttagccaggctagtctcgaactcctgacctcaggcaatccacccgccttgtcctcccaaagtgctgggattacaggtgtgagccaccgcacccggcctcaaagatcttttgaggtaagtccctcactggttaggtgagtctatcctggttttacagatgtgaaaaagcaggcactgagaggtaaggtaatttgcccaaggtcacgcaggcagttattagccgagtaggaaccatgcccagctcacaaccctcaccttgagtcagtctgaccccaaaaatctattgttttttttaattttttttttttttttttttttttttgagacagagtctcgctctgtcactcaggctggaatgcagtggcgcggtcttggctcactgcaaactctgcctcccgggttcacgccattctcctgcctcagcctcctgagtagctgggactataggcgcccaccaccacacccggctaattttttttgtatttttagtagagatggggtttcaccgtgttagccaggatggtctcgatctcctgagctcgtgatccggccacctcggcctcccaaagtgctgggattacaggcatgagacacagcacccggcctttttttaatttttgagatggagtcttgctctgttgtccaggctggattacagtggtgcaatctcgtctcactgcaacctccgtctccagggctcaagcgagtctcctgtcccagcctcccaagtagctgggattacaggcacccgccaccatccccagccacattttgtatttttagtagagatgggctttcaccacgttggccaggctgttctccaactcctgacctcaagtgatctgcctgcctcagcctcccaaagtgctgggattacaggcatcagccaccacacccagcccagaatctactcttttgaccagtacactgagcttctgaagcatgtccccaagcaagcatcgatgccctcagacagtttggggtggccagagccaaggctgggagcatctagtcaagagcatcctagccaaggactctaagtgctcttaagtaaagctgtggaagtgctgtgttttttttcttttttcttttttttttttttgagatggagtctcgctctgttgcccaggctggagtgcagtggcacgatctcagctcactgcaacctccgcctcccgggttcacgccattctcctgcctcagcctcccaagtagctgggactacaggtgcccgccaccacgcctggctaattttttgtatttttaatagagacagggtttccctgtgttagccaggatggtctcgatatcgtgacctcgtgatctgccctcctcagcctcgcaaagtgctgggattccaagcgtgagccactgcgcccagccacaagtgctgtttcatcattccctgagggtgccacaacgtggggagtgttaggttgctgattacagggtactgcctgagttacacagaaatgtttctttcttttttttttttttttgagacagtctcactctgtcaccaggccggagtgtagtggcactgtcccggctcactgcaatttctgactccctggttcaaatgattctcctgcctcagcctcccgagtagtacgcatcaccacactcagctaattttttgtatttttagtagagacggggttcaccatgttagccaagatggtctcgatctcctgacctcgtgatctgcccgcctcggcctcccaaagtgctgggattacaggtgtgagccaccgcgccccgccttctttttctttcaatgaactttattgaagcaaaaatgcacatacaatgtaatgcacacatcttaacgtacagttccatgagtattaccaagtgtatgctcctatgcaatcaccactcctatcaaaatacagggcattcttatcatcctggaatgttccctcacgtgtccctttacaggcaatcttttccctacaccctgccacaagcaactactgatctgatttccatcactataggttgtttttgcctgttttataagtttaagaccgggtgcggtggctcacgcctgtaatcccagcactttaggccaaggagggcggatcatttgaggtcaggagttcgacgccagcctgaccaacatggaggaaccccgtctctactaaaaatacaaaaaattagctaggcgtggtggcaggtgcctgtaatcccagctactcaggaggctgaggcaggagagaacccgggaggcggaggttgcagtgagccgagatcgcgccattgcactccagcctgggcaataacagcgaaactctgtctcaaaaaaaaaaattagcaaaaggccgggaacggtggctcacgcctgtaatcccagcactttgggaggctgaggagggcggatcacttgaggtctggagtttgagaccagcccggccaacatggtgaaaccccgtctctactaaaaatacaaaaattagccggaaatcccttgaacctggaagggggaggttgcagtgagccgagatcacgccactgcagtccagcatgggcaacaagagcgagactctggccgggcgcggtggctcacgcctgtaatcccagtactttggaaggccgaggagggcggatcacaaggtcaagagatcgagaccatcctggataacacggtgagaccccgtttctactaaaaatacaaaaaaaattagctgggcgtggtggcggacgcctgtagtcccagctactcaggaggctgaggcaggagaatggcgtgaacctgggaggcggagcttgcagtgagccgagatcgcgccactgcactccagcctgggcaacacagcaagactccatctcaaaaaaagaaaaaaaaagagcgagactccgtctcataaaaataaaaataaaaataaataaaaaatagcaaaagactgaataggcactttataaaagaagacatacaaatggccaatcagcacatgaaacatggtcaatatcattgatctccagacaaatgcaaatcaaattgcaatgatgtgcccacaacacccattaaatggccaacgctaaagactgacaatatccaacgttggccatgccatggaataactggaaccaccatacactgattttggaaatctagaatggaaaaaccatttagaaaaaaatcgtttggcagtttcttataagttaaacacacactgatatgatcgaacaactccactccctagttacccaagataaaggaaaactatccacgcaaacttacaggaatgtttacaggagctaaaacaatgggcaaaactagaaacccacatgtatatcaaaagagaaaaataaatctgctttttaaaaaagattgaaatatcttgtattttaatacccgaaaaaattttatttccccctagactgccaattccagctgagcaggctctctaaccatcttatttactaccatactctcaatttctggcacggagtaagcgcgcaataaatgtttggtgaatgaatgaaagaatgcccgctttcatacactaatgggtttgtagccaccacccctcaggccttttacgccctcattccttccaggtacaaacgctatctgggctaggccaaatgtggctcgcagcgggtccgggagcggggcacctaccggcagctcccgcagcggaggcgcgtcccccgggcgccgaggcagcgcccgcggctggaggggcccggggcgggcgccgagcccgagggatgcgcgcagcgcggggtgccccgggaggcagcggccgggcacgctgggaccgacggcgcgggacgccccgacgccgggcagcacttacccgccgcaccgagagagctacgcggccccgcggccctgcagggcacagggcggccccctgcccggggctctcggtggcgcactgggcggcggggcgggccgagggcagcgggggcgggacaggacagacgagaatcccgcggaggtgaggccgggggccgccccgcccccgagggcaggccctgagccccggccccgcctcggccggccccgcctcggccggggcgtgggctccggctgcagctccggtcygctctcttggctcsggaacccccgcgggcgctggctccgtctgccagggtgagggggccgggaaggggcgcgcgggggtcccgggtctcggaaatcgggcggggacggaacgggctcgggctgcggggcctccagactcagtcgcacgctcagatttcgggatttctacccccggctgggatcgcgtaacttcctcattcccgcctggacccctgcccccggcccgcctggcctggcgtgagccccgtagccgcgcgctctccggaccacccagggccgcttccccgcgcagctgctgcgccgccccaggtcggagccttccgggcctggctgggtgttccccggggctctggttacgggacggggcggggggcggggggcgggactgggattgtggatgaaggactaaggtaggggatgggggctcgaaggggtcggtggggcgttgcaaactggtcaggcgtcatccgcgggcggtcaggagkccgtgggggaagaggaggatctggaagagatggaggacctgcgggagttaggatggggggcgggttctgcaggacagctcgcctccctgaggcttcccaatgttcctaggatgacggcgacccctgagagcctcttccccactggggacgaactggactccagccagctccagatggagtccgatgaggtggacaccctgaaggagggagaggacccaggtacacagggaagatggatggccctcagggaggagaggcgttcgggagccagggggctggggcctgttgtggtctacactcctcgactttctttcctcccagccgaccggatgcacccgtttctggccatctatgagcttcagtctctgaaagtgcaccccttggtgttcgcacctggggtccctgtcacagcccaggtggtgggcaccgaaagatataccagcggatccaaggtggccagwctggccccagggagggggaaagggagggcggcccggaatggatccaaggtggctgggctggccccagggaaggggcaaaaggagggctggccagagtggggaggcggggacccacgcaggggacatccattcagttcctcatacccctaggtgggaacctgcactctgtattctgtccgcttgactcacggcgacttttcctggacaaccaagaagaaataccgtcattttcaggagctgcatcgggacctcctgagacacaaagtcttgatgagtctgctccctctggctcgwtgagggcgaccggactgcttcctgtagmgggcaggtgctccccaccctcctttctgtctgtctcaccccggggccacaacctttcytccctgcaactctggccactgtgctgcctcccctgaccccagttaccaggaaactttccctgctcagctttccctgtccatggttctgtgccagcatctcagctgggcgggatgcccaaaatgctcttggcagcctcacccttttctagtctccattcccagggtagggggcctccgttttgccagcctctaggccttttgtttgttttttgtttttgttttgtacaaggtctccctctgtcacccaggctagagtgcagtggtatgatcttggctcatggcaacctcctgggctcaagcagtcctcccrtctcagcctccagagtagctaggaccacagccaccacacccaactaatttttgtatattttgtagagatggggtgctgctgtgttgcccaggctggtcttaaattcctgagctcaagtgatycacctgctgcggcctccccaagtgctgggattccaggcgtgagccaccacgcctggccacctccaggcctcttcttttcctccragccccatctccagtgttttcaggaaccagagcacccmgcctcccagctcttacctgaccttcatccrtcctttccacagwtttgccgttgcctattctccagcccgagatgcaggcaacagagagatgccctctctaccccgggcaggtcctgagggctccaccagacatgcagccagcaaacaggtgggaccagatgccaggtcctccgggaaggcattggaggtgcaaatggctcggtcccatctgtctctctctctctctcatctccacttcagaaatacctggagaattacctcaacygtctcttgaccatgtctttctatcgcaactaccatgccatggtaaggtccaggggccgattttagatgtggagcaggattatcagaccctcggggaggagggccaggggccccagggtctgaggggctgaaagccaggtrtctcctccgggcttttgttttcctctgcagacagagttcctggaagtcagtcagctgtcctttatcccggacttgggccgcaaaggactgtgagtgtctggcccccttcacccaggcatccgtagacatcastcttaatttctccctgcctgagattggggcaagcagtgcagggtgggctgggggtctggagtcctcatcccgcctctcttcctgattgtcccacagggaggggatgatccggaagcgctcaggtggccaccgtgttcctggcctcacctgctgtggccgagaccaagtttgttatcgctggtccaagaggtacgggctatggccaagcagctgggcagtgggtgggggtgaggaagaaaattttgagggcagagaggaacacacggagcccttctgctctaggtggctggtggtgaaggactccttcctgctgtacatgtgcctcgagacaggtgccatctcatttgttcagctctttgaccctggctttgaggtgcaagtggggaaaaggagcacggaggcacggyacggcgtgcggatcgatacctcccacaggtgaggcctccctggggtgagagacaccagctgagtggtgagcccacccacggccttgctgggagttgagaaagagagaccacaggagagaggaaggcttttccacctccctggatcgggacatagttttgaaccaggaactggtctagccagatgcttgggactgctcttagactgggcccagagaaaggggattagtagaagcctgggaagggaactgctgacataaacgaaattccatttgttcatttgttcattcaacaaacccgagtgcctggtacaatactggttgctgatgcaatactaggatccaactatgagtaaggtggatatggccgggcgcggtggctcacacctacaatcccagcactttgggaggccgaggcgggtggatcacctgaggtcaggagttcgagaccagcccagccaacatgctaaaaccttgtctctactaaaaatacaaaaattagccgggcgtggtggtgcgtgcctgtaatcccagctatttgggaggctgaggcaggagaatcgcttgaagctggggtgcagaggttgcagtgagcagagatcacaccactgcactccagcctgggggacaagagctaaactctgtctcaaaaataaataaataaataaggcagatacatacacgccctatccctgtgcagttgtgattagggactaagggaggaagtgggaaagaaaggggaggtctctaggcaagatcacaggtatggagggcgaggatttatggacatctcatcgttcccatccaggtccttgattctcaagtgcagcagctaccggcaggcacggtggtgggcccaagagatcactgagctggcrcagggcccaggcagagacttcctacagctgcaccggcatgacagctacgccccaccccggcctgggaccttggcccggtggtgagacactgacatcccttctgagcttgtctgtggctttcttgaccccctgtgtaatctctgagtccttcatcctctcttttctcatctgaaccctcctgacctcaatgacccrccccgtgacttctttaatcttcctgacctttgacatctttaaccacattgatctctctgatttcgcgccgacctttctgacccccaaacttggtcatctcttctgacccttgacctctctaacctcctataaccttttaaacccctctctacaatactgaccctctctgttctccatgatcttctcaaatctctctgatttagtccttcatttaataaacattttcttttctttttttttttttttttttttgagagagagttttgttctgttgatctcggctcactgcaacctccgcctcccaggttcaagcgattcttctgcctcagcctcccgagtagccgggattacaggcgcccaccaccacacctggctaatttttgtatttttagtagagacggggtttcaccatgttggccaggctcttctcgaactcctgacctcgggtgatccgcccgcctcggcctcccgaagtgctgggattacaggcgtgagccaccgtgcccagccttaataaacatttttctaagcacctagcagtgctggcagtaacacacagtcctctctgggttagggaagtaggtgatcaaatcgtgaaacaatgtgaacttgccgtactggtgataggtagaaggtgacacgcacagacaggaagtacctggcccagcagggatatcaggacaggtttccaggaggtggtgaccctcaggtagttttgctttaaatcagagactgacacaatattaattttgttggtttttgttggagacagtgtcttgctctgtcaccaggcgtgtagtgcagtagtgtgatcatggctcacggcaacttcaacctcccaggctcaaatcatcctcctgcctcagcctcccaagtagctgagactacagacacatgccaccacacccggctaattaaaaacatttttttttacaaaaaattttaaaaattagacgggtgtggtctcgaactcctgggctcaagggatcatcctgcctcggcctccccaaagtgctggattgcaggcatgagcgacagtgcctggcctatatacttttttttttttaaggcagagtttcgctcttgttgcccaggctagcgtgcagtggcacaatctcagctcactgcaacctcagcctcccaggttcaagggattctcctgcctcagcctcccaagtagctgggatcacaggtgcatgccaccacacccagctaatttttgttttggttttttttttttttttttgagatggagtctgtctctgtcaccaggctggagtgcagtggcaggatcccacctcactgcaacctctgactccccggttcaagtgattcttctgcctcagcctcctgagtagctaggattacaggcatatgccaccatgtccagctaatttttgtatttttagtagagccagggtttcaccatgttggccaggatggtctcgatctcctgacttcgtgatctgcccacctcggcctcccaaagtgctgggattacaggcttgagccactgcacctggctataaacttctaaaacagccaaaaccaatccacagtgatggaaatcagatcagcagttgcctgtggcagggtatggggaaatgattgcctrtagtggggcacacgagggaacattccaggacgataaaaatgtcctatattttgataggactggtgattgcgtgggaacatacacttgctgatcctcatggaactatacaagataaagaaaatgcagaacagtccaggcacagaagacagaaatagctcagggtgtttgggaaccaccaggacatattgttgttactgagtgaggaggagcagtcagaggagaagctgggagtcagtggcacctgatctcacagggtcccatgtgctaatatcacaggcacacagggcagtcatggaaggaagttttgtttgttcgtttgttttgttttggtttggtttggtttttgagatggagtctggctctgtcgcccaagctggagtgcagtggcgcrataccagctcactgcagtctctgccccctgggttcaagcgattctcctgcctcggcctcctgagtagctgggattacaggcgtgcaccactatgctcagctgatttttgtatttttagtagagataggatttcaccatgttggccaggctggtcacgaactcctgaccttaagtgatccacccgcttcggcttcccaaagggctgggattacaggcatgagccaccttgcccagccttcctgcatattttcacatgtgcatgcacgtgttacttttgtttcaacataaatgagatcatgcaacctcttctgtgacttattttttcacttaatacctgtgtgagagattagacacttakattatttcccatttttcactcttacaaacaatgtgatgaacacaacatttgcctaggcattgtattagatgtattcctagacatgtaattaccatgtatatttaatgatattaaagggtatatgcatttaatattttgatactgctgaccagtcgctttggctcatgcctgtaatcccagcactttgggaggccgaggcgggtagatcattggggtcaggagttcaagaccaacctggccaacatggcaaaaacccgtctctactaaaaatacaaaaattagccaggcgtggtggcgggcgcctgtaatttcagttacttgggaggctgagacaggaaaattgcttgaacccaagaggcggaggttgcagtgagccaagatcatgccattgcactccagcctgggtgacagagcgggacaccatctccaaaaagctatatatatattttttgatactgccaaattgtctcctaaaagttatattcccatagtctatgagaatacccacttccccagcatattgaatattgatattgaatgttaccagtgatttgaattattaccaatctaatggattttttaaatgtaatttcattttaatttcgttgtttactagtgaaactgaacatttgccacgattggccattttaatttctctgtgaactgtcagttcttactctttgctcatttttcagttggctcatgtgactttttcttgtcgatttattggtgttctttatgtatgatgtattaatcctcctgttctttagttgattaggttattgtgtctttttgtaatttttatttgtatttagcgcatatgggcaaacactattttgatgtgtctgataccacttgtgttctctgatcatttctgatctttgaccttgctgtcacctctgacccacgactgtcctccggtcttcactctccagagctttctggcttctgactcccctgacctccttggcttggcctccccccaggtttgtgaatggggcaggttactttgctgctgtggcagatgccatccttcgagctcaagaggagattttcatcacagactggtggtgagtgggaaaaggccccaacaacatggggcaggatagagcctggggcagatcagcattaggaggagaaggggggtgcagctggtggtctggggcttcgtttgcccctaatccactgccctgaatcccaggttgagtcctgaggtttacctgaagcgtccggcccattcagatgactggagactggacattatgctcaagaggaaggcggtgaggagagtggtcaggcckcagggggagggggttgcctgtgggtggaggttgattagcagggctgcagtgtgggagaattaggcagtctgaggcttcaggggagggraaagtgtccatcctggcccagcacctgtcagacatcacytccgccctctccctctgccctaaggagaactgacaacttcctcttcatgctccctccacctggcagagacttccctcccagtatacataatactttattgtgttatctgggggtatacatgtctatctctctcactggactagttaatatcactgttccactacaaggcacagtacctgccatggagggggcatgtgtggtgttgatggacaggaagaaggatgcatggatgatgcagggtggctgggcaggtggatggatagaggacagaaagggtgatggatggaaggatatgagttggaaaggtggagggctaggagggtaggcaggtagatggatgaatgatagacggtacataaagggatgagtaaatgcttgggaagatggatggatggatgatgaagggtgggtggatagatgtgtggatgggtgagtgggtgagcacacagatgacatttagtctaagtctgtggcaagcagcaaagcagggcatatgtggcagagcctctaggatctccagacaagctggagggacacacgtggaaaaggtttgggagtgtggaaaggggctactctgggagaggcactaggatctgattccccaactcaccaccaggaggarggtgtccgtgtgtctattctgctgtttaaagaagtggaattggccttgggcatcaacagtggctatagcaagagggcgctgatgctgctgcaccccaacataaaggtgactctcggcctcagagaccctcccacatgacagcccttctccccacactgtcccagcccccagcgctcccgctccctgatggtctcatctttccatctttcctctctccctcccagtacctcctgttttccttcacctaaacccaccctcatgaaccctccatgcctgctccaggtgatgcgtcacccagaccaagtgacgttgtgggcccatcatgagaagctcctggtggtggaccaagtggtagcattcctggggggactggaccttgcctatggccgctgggatgacctgcactaccgactgactgaccttggagactcctctgaatcagctgcctcccaggtaatccccctgaggccttcctgagcacccccaaactcagataagctcaatcaacaccatttccyagctccagccttaccccctcagtcattscaggccctgccaacctcagggttcctcagactttctgggactccaagaacccactttgaaagtgctgtaactggccgggagccatggcttatgcctgtaatcccagcactttgggaggccaaggcgggtggatcacctgaggtctggagttcgagaccagcctgaccgacatggtgaaaccctgtctctactaaaaatgcaaaaaattagctgggcatggtggcagttgcctgtcattgaagctactcgggaggctgaggcaggagaatcacttgaacccaggaggcggaggttgcagtgagccgagattgtgccattgtactccaccctgggcaacagagcgagactctgtctcaaaaaaaaaaaaaaaagtgctgtcacccacccagtcctttccccattttcactgaccatcaccccattcctctaaaagtgtcaaaggcaactggaggggagggctggggaatcagaccctctgtttcattcttcctctcggtctctctcactctttcagtgctcctctctttggccctggctctgtacagccccatgacttmcccttgcccctggcttgggtgtgttccccctacagcctcccaccccgcgcccagactcaccagccaccccagacctctctcacaaccaattcttctggctgggcaaggactacagcaatcttatcaccaaggactgggtgcagctggaccggcctttcgaaggtgaagcctcccacccgccaaagccccagagagctgagagcagggtcagaagctggggmtggtactgagagtgggatgagaggggtcaasggtggtacagccctccctctggcaggctctttctccctgccccaagtgtcccaaggagtccarccctgacatctcccctgactctcctgggaccccccagatttcattgacagggagacgacccctcggatgccatggcgggacgttggggtggtcgtccatggcctaccggcccgggaccttgcccggcacttcatccagcgctggaacttcaccaaggtgttcattccctccgataggggctggaggtagggagggagccagggcagattggcacctcctgctgactctgccatccctccacgtcagaccaccaaggccaagtacaagactcccayatacccctacctgcttcccaagtctaccagcacggccaatcagctccccttcacacttccaggagggcagtgcaccaccrtacaggtgaggccccccacttcagccagccctcccctttgtctccttcagcctaacaccccaacccactctccctggtgtgagagctgcccacactctcctttcctggggttaagaagcacatcacggccaggcacggtggctcacgcctataatcccagcactttggaaggccaaggcaggcggatcacaaggtccggagatcgagaccatcctggctaacatggtgaaaccccatctctactaaaaatacaaaaaattagccgggcgtggtggtgcgtacctgtagtcccagctactagggaggctaaggcaggagaatcgcttgaacccaggaggaggatgttgtagtgagctgagatcacgccactgcactccagcctgggcaacagagtgagactccatctcaaaaataaaataaaaggccaggcgcagtggcttacgcctgtaatcccagcactttgggaggccgaggcaggcggatcacgaggtccggagagcaagaccatcctggctaacaccatgaaaccctgtctctactaaaaatacaaaaaattagccgggagtggtggtgcgtacctgtagtcccagctacttaggaggctgaggcaggagaatggcgtgaacccaggaggaggagcttgcagtgagcggagatcatgccactgcactccagcctaggcaacagagcgagactctgtcttaaaaaagaaaagaaatgaagcacatcgcattcaccattccctaggtcttgcgatcagtggaccgctggtcagcagggactctggagaactccatcctcaatgcctacctgcacaccatcagggrgagccagcacttcctctacattgaggtctgactgggaggaggtgggggagagcatggaaggggtgtcccaggagagagacctggggaatgagtggagtcagtcattgagggctggtggagcagaagcagacgcctggagcctgggaccaaggctggaggccgaggacagggccaggggccaggctgctgatgtctgtctctgattcttgccccagaatcagttcttcattagctgctcagatgggcggacggttctgaacaaggtgggcgatgagattgtggacagaatcctgaaggcccacaagtaaggtggactgtcaggaaggtggggactgtgggtgtggtttgagcccggttgaagggggtggggtttgagggaccagtcscacctctgactccaccccctccccagacaggggtggtgttaccgagtctacgtgcttttgcccttactccctggcttcgagggtgacatctccacgggcggtggcaactccatccaggccattctgcactttacttacaggtgaccccccaggcggactccagctctcagtggccccatcccacccgtgtccccctcctgattctgtcctgatcccttcctgctgggccttaaagaagggccacctctcctgacctcccctcccctctgccagcctccacttctctccctctttcttttctctcaggaccctgtgtcgtggggagtattcaatcctgcatcgccttaaagcagccagtgagtgctgggggytgggggctcaagccctgggcccctgggagagggagattggggcgctgcaggcctgggggtgggggaaggaggctgtcactcctgtgagcctctgacgctacgcagaccatagctggcctttcactgcagggagaaggagagagaccagactctatgtaggaagagyttctggagtgagaggaggtgggacagggccctgtgcacacagagccacctctcacctcacttcccctcctgtcacgcagtggggacagcatggcgggactatatttccatctgcgggcttcgtacacacggagagctgggcgggcaccccgtctcggagctcatctacatccacagcaaggtgctcatcgcagatgaccggacagtcatcattggtcagtgccggatctagtcctctggcagggagagggtgtggggacaggcgaagagatgagaggcaggatgacagagactgcagctgaggctcrtgtaggggtggagggtccaagaaggaatgttgcaggccagtgctttggtagaggggatggggtactggggagagtgccctgggcccaagcasacagtgtgccccgcatccaccccaggttctgcaaacatcaatgaccggagcttgctggggaagcgggacagtgagctggccgtgctratcgaggacacagagacggaaccatccctcatgaatgggrcagagtatcaggcgggcaggtttgccttgagtctgcggaagcactgcttcrggtagagctggggcgggatgccacagggtgggagggagatgggggcgtctgccttttgagcaggacaagaggtagcaccgcataggtactcccggagccagaggtagaggcagtactagattctcaataggcaaggctgggcgcggcagctcacgcctctaatcccagcactttgggaggccaaggcgggtggattgcctgaggtcaggattttgagaccagcctggctaacatagtgaaacccgtctctactaaaaatacaaaaaatcagctgggtgtggtggcgggcgcctgtgatcccagctactaggactaatcagtttagagtatcagtaaagcaggaacaccaaaaaacaaaaagagaaaaaaatcttttttttttgagacggagttttgctcttgttgcccaggctggagtgcaatggcgagatctcagctcactgcaacctctgccctgggttcaagcgattctcctgcctcagcctcccgagtagctgggattacaggcatgcgccaccacgcccagctaattttgtatttttagtagagatggggtttcgccgtgttggtcaggctggtctcgaactcccgacctcaggtgatccacccacttcagcattccaaagtgctgggattacaggcgtgagccactgcacctggccacraaaaagaaatcttttttgttgttgttgttgttgttgttgagacacggtttcactcttgtcgcccaggctggagtgcaatggcacgatcctggctcactgcaacctccgcctcctgggttcaagcaattcttctgcctcagcctccggagtagctgggattacaggcgcccaccaccacgcccagctaatttttgtatttttagtagagacagggtttcgctgtgttggccaggctgatcttgaactcctgacctcaggcttcrgcctcccaaagtgctgggattacaggcatgaaccaccgcccctggccaaaaaaaaaaaaaaatcttttttttttttctttttttttgagagggagtctcactgtcgcccaggctggagtgcagtggcgcgatctcggctcactgcaggctccgccgcccagggttcatgccattctcctgcctcagcctcccgagtagctgggactacaggcacccgccacctcgcccggctaattttttgtatttttagtagagacggggtttcaccgtgttagccaggatggtctagatctcttgacctcgtgatctgcccgcctccrcctcccaaagtgctgggattacaggcatgagccaccacgcccggccaaaaaaaaaaaacttttgtgttttgtttgtttgtttgttttctttttgagacggagtcgctctgtcacccacgctggagtgcagtggcgcgatctcggctcactgcaagctccgcctcccgggttcataccattctcctgcctcagcctcccgagtagctgggattacaggcgcccgccaccatgcccagctaattttttgtatttttagtatagatggggtttcaccgtgttagccaggatggtctcgatctcctgacctcgtgatccgcccgtctcagcctcccaaagtgctgggattacaggcatgagccaccgtgcccggccaaaaaaaaaaatcttttaaaagtaatttttttcacaggttctgaggattggggaaagaacagaaaaagaagaaaatttaaaataaaaataattttttaaagcatcaaggtagtcatcaaagtcaagacaaatcagaactctgttggcttcttttacacttattttactattttatattgcatttattttgtttttgtttgtttgtttgttttgagatagggtcttgctctgtcacccagctagagttcagtggcgttaccacggctcactgcaacctcgacttcgccagctgaagtgatcctcccacttcagcctcccaagtagctgggactayaggcacatgccaccgtgcctggctaatttttgtatttttttgtagagatggggttttgccatattgcccaggctggtcttgaattcctgagctcaagcaatccacckgcctcrtcctcccaaagtgctgggaatacaggcgtgagccaccgcacccagccaattttgaattacctgagtagggacaatgtaacttttctggtactcaggttctctaaggatcttaatctggccctgctgggacccctttctcctatagtgtgattcttggagcaaatacccggccagacttggatctccgagaccccatctgtgatgacttcttccagttgtggcaagacatggctgagagcaacgccaatatctatgagcaggtgggaacytgggaggggtgggggagagtggcctggggaaatttgtggattatcctgctcagggtaggatggagagaagcgccaccatacagtcattattggaagggggatgagggcctggggacatttgctatcaagagatttagtggcccaggccgggtgcagtggctcatgcctgtaatcccagcactttgggaggccaaggcccggtggatcacctgaggtcaggagtttgagatcagcctcccaacatggcaaaaccccrtctctactaaaaatacaaaaaaattagctaggtgtggctgggaggctgaggcaggagaatctcttgaactcaggaggcagagatttcagtgagccgagatcacgccattgcactccagccacctgggcaacaagagcaaaactctgtctcaaaaaaaaaaagtacaaaagttagccgggcatggtggtgggcacctgtaatcccagctactcaggaggcagaggcaggagaatcacttgaacccgagaggtggagattgtagtgagccgagatcgcaccattgcactccagcctgggcaaaaagagtgaaactccgtctcaaaaaaaaaaaragagagagagttagtggcccagggtcaacggggggtatggagagatggtatgggggaaggggtctagcctagttggacttagattgttgggagagtctccccaagccttactggcgtccaygccccygcccacagatyttccgctgcctgccatccaatgccacgcgttccctgcggactctccgggagtacgtggccgtggagcccttggccacggtcagtccccccttggctcggtctgagctcacccaggtccaggrccacctggtccacttccccctcaagttcctagaggatgagtctttgctgcccccgctgggtagcaaggagggcatgatccccckagaagtgtggacatagttgaggcccccgtcagggagaggtcaccagctgctgtgccccaccacgtctggctccctgccccttaaccccaaggactgagggcagtgccctttgagatctggggaggcaggcattcctgaagggaactagaggtgttacagmggacccttacgtgagaaatagctgaaaagggcactcccaaccctgggctggggaggaggagagagtcccagagctcatcccccctgctgcccagtgcaaaccacttctccatgctgcaaaggagaagcacagctcctgccagggtgagcagggtcaagcctcttattccaggagaagggggctctgccccaggccctactacccattgttcccttcctcttcctgcccttgaaccccctccctgtcccagggccctcccagcccattgctgccaaggtggagggaaggataaagccacttctggcttcagcccccmccaggggaaggaaggagggcacattaactccctccaccagcctgctgacagacactaactttgtatccgttcaataagcatttcataaataaaggtgtagaaaaggttcatgcgtcttccttggaggaactaactgctcgttccagcctcccgttcctgcccacacggggcaccagtccccttcaccttatctccaccctcctccactctcctctctccacctctgttctacctatctgtggcttcgggagctcggtcacctggctcctgagaggagaaggtgttgacacagtgccgcctgggtagaaggacgggcagggcccaaccagggcacctggagaactgtggagctgctatcacaaccgcaggtgagggagatgctctgagaaggacctagagaggctgcctcttgttcaagcaacagccctggtagaggcttaatgaaggccctgtgggagtggttgagggtataggcttaaggtcaggaagacctggacccaaatcctggactcctcaatgagaagctaggtgaacttgtcaagtcattcacttctctgggcctcagtggtccccgctgggaaatgggaataatacttacatgactagcttgctgtcaagactcagccattgacttaaatatttattgattccctgctatttgccagctctgttctagactcacagaagtgagtgcaacaaagtcctcacccgtatggcacttctgttctggagcctcactgtccagtacagtagccactagccactagccatgtttggctatttctttttctatttattattattattatttttttttttgagacggagtcttctctgtcacccaggctggagtgcagtggcatgatctcagctcactgcaacctccacttcccaggttcaagcgattctcctgcctcagcctcctgagtagctgggactacaggtgtgtgccaccacgcccggctaatttttttttttttgagacagagtcttgctctgtcgtccaggctggagtgcagtggcgtgatctcagctcactgcaacctccacctcctgggctcaagcaattctcctgcctcagcctcctgaacagctgggattacaggcgcccgccaccacgcctggctaatttgtatattttttagttggccaggctggtctcgaactcctgacctcatcatccacccacctcagcctcccaaagtgctgggactacaggcatgagccactgcacccagactaatttttgtatttttagtagagacagggttttgctatgttggccaggctggtctcaaactcctgacctcagatgattcacccgcctcggcctcccaaagtgctgggattacaggtgtgagccaccgtgctgggcctggctatttcaatttaagtgaattaaaattagaattaaaaatgtaggggctgggcacagtggctcacgcctgtaatcccagcactttgggaggccaaggtgggtggatcacttgaggtcaggagttcgagaccagcctggccaacatggtgaaaccctgtctctacaaaaataaaaaaattagccgggtatgatggcgggtgcctgtaatcccagctactcaggaggctgaggcatgagaatcgcttgaatccaagaggcagaacttgcagtgagccgagattgcaccactgcactccagcctgggcgacagagcaagcaaggctttgtctcaaaaaaaaaaaaaaaaaaatttagtcccttacactagctacatttcaagtgctcagtagccaattgttgccagtaactaacatattggacagtgcaagtatagaccatttccatcactgcacagagttctactggacagccctcttcccagagggaagaggtggaaaatatggcaaggtctatggaagcgtattgcacataccaaactgggaatggttaccttccagaagaggtatacagagagaatgtcactggtaacaatggtaaatttttttgacggggaggggcagacagagtcttgttctgtcccccaggctggagtgcaatggcacaatcatagctcattgcaatgttgaactcctggactcaagagatcctcctgcctcagcctcctgaatagatgggactacaagcatgtgccaccacacctggctaatgtttttattttttgtagagatggggtcttgctctgttgcccaagctggtcttgagctcctgggcttaagtcatcttcccacctcagcctcctaaagtgctgagattacaggcataaatagcacctggccctttttatttcttttctttttttcttttttttttttttcgagatggagtcttgctctgttgcccaggctggagtgcagtggcacaatctcagctcactgcaccctccgcctcccaggttcaagcaattctcctgtctcagcttcctgagtagctgggactacaggcgtccactaccacgtttgactaatttttttatatttttagtagagacggagtttcaccatgttggccaggctggtcttgaactcctgacctcaggtgatccaccctcctcggcctcccaaagtgctgggattacaggcacaagccacagcacctggccccttttattttcttaaactgagtgtatataaaagctgggcatggtggctaaagcctgtaatcccagctattcaggaggctgaggcaggaggaccaagagttcaagctcagcctgggcaacatagcaagaccccatctctaaaaatttcttaattaaaaaaatataaacacacatattcataactttttgtatgtctgaaattttttatttttgttcctttttattttttagagacaggtcctgctttgtggcccaggctagagtgcagtggtgcgatcacagctctctgcagctttgatttcctgggctcaagcaatccacctcagcctccagagtagctgggactacaggtgcatgccatggtgcccagcttatttattttttcatttttgagacaggctctcagtctgttgctaaggctggagtgcagtgcagtgggtaatcatggctcactgcagcctggacctcctgggctcaatcaatccttccgcctcagcctcctgagtagctgggattacaggcaggcgccaccatgcctggctaatttttgcataatttagtagagacggggtttcactgtgttggccaggctggtctcaaactcctgacctcatgatccgccctcctcggcctcccaaagtgctgggattagaggcatgagccaccgtgcctagcccaaaatattttcttttctttttttttttttttttttttgagacagagtttcagtcgttgcccaggctggagtgcaatggcgcgatcttggctcaccgcaacctacgcctcccgggttcaagtgattctcctgcctcagcctcccaagtagctgggattagaggcatgtgccaccacgctcggctaattttatattttttagtagagacggggtttctccatgttggtcaggctggtctcgaactcccgacctcaagtgatccgcctgcctcggcctcccaaagtactgggattacaggtgtgagccaccgcacccggacccaaaataatttcaattagaaaaaaatgtaggtcgggcacggtggctcatgcctgtaatcccagcactttgggaggccgaggtgtggggatcacaaggtcaggagatagagaccatcctggctaacatggcgaaaccccctctctactaaaaatacaaaaacagccgggcacggtggtgggcgcctgtagtcccagctactggggaagctgaggcaggagaatcgcttgaacccgggaggtgaaggttgcagtgagctgagattgcgccattgtactccagcctgggcgacagagcgagactccatctcaaaaaaaaaagaaagaaagaaagaaaaaaatgtagcacaagtcctggctcttgcccttcattcccacagcctcacgccccagtctcagaactgaccgcagatgcaggaggaaactgaggggggtgaagtatggagattaggaagccctcctggaagagagatgtgctgggtgggtgaggcatgaagaggggatgatgttgctctgcctcatcctctccttcgagttcagccctcagtcctcacaagaagctaaagaagctacttctgtgccagaattcccccctcctacatatagcggtctcctggtactaattggcatcctgttaattagcctcattgtcagcactaactgcctctttccccgagggggaccattacctcattcaccgtggagtgagatagaggcagcggttgccccaggctgggccaggggtgccgagggcttctgcttcacactctctgccttcgcctccctagtcctggaggtttttgtttgttttcggttttttttgagatggagtcttgctctgtcacccaggctggagtgcagtggcacaatcttggctcactgcaacctccacctcccgggttcaagcaattctcctgcctcagcctcccgagtagctgggattacaggccccctgcaccgtgcctggctaatttttgtacttttagtagacacggggtttcaccatgttggccaggctggcctggaactcctgatctcgtgatccacccgccttagcctcccaaagtgctgggattgcaggcatgagccactgtgcccagcctagtcctggagttttttaaatggagaccaaccatagtgagggggggtgggcggtggaagcagagggcttagaatcagaagagttggctctaaacccagaatggaaaaaggagcctctatgactgaggcattagtaaatttattgaggacctagtatatgctaagtgctttacataaattattttatcctaacctccctattattatcatctccattttacagatgacagagttgagcctcagagaggttagtgatttgcctaacgcactacctccaaattctatgctttttcctactatcccatggtcttgactttgaactgctacagtgcccacccagacaacagatgccttcattactttttttttttttttttttttgggatggagtctcgctctgtcgcccgggctggagtgcagtggcatgatcacagctcactgcaacctccgcctcccgggttcaagcaattcccctgcctcagcctcccacctagccgggattacaggtgcacaccaccacgcccagctaatttttgtatttttcatagagacaggttttcaccatattggtcaggctggtctcgaacccctgacctcaggtgatccacccgcctcagcctcccaaagtgctgggattacaggcatgggccacggtgcctggccaccttcattgcttaagtgttagtgattttctttcttttgttttttttttaagcgttattgattttctagtgggtgccaggccatgtgctgaacaagactaatattattcctgcttttaaggagattcaaaagacatttacaattcaaatcattaaatgttaccatggactaaagccaggcagctaaaacagaagaaccaaacttagtcttggtgagtcaaggaacgcttcatggaggaggtgatttagacacgtaggacaaagcaaagcacggtaagaatgggcatggtcaagaggctagggaatattccaaagagaaaacagagtacatgcaaaggttgggggagagaaagttgagttctgggaagtgagtagagtatttcagtatggctggaaaatgtgaggtctaatagttgagtattgaaaagtaaggcaggcactgagcagggtggttcatgcctataatcccagcaactcaagagcctgaggcaggattaacacttgagcccaggagttggaggctgccgtaagccatgatcgtgccactacactctagcctgggtgatagagcaagaccccaactcctaaagaagcaaaccgttaacaaagaaaaagaaggcaagaaaagccagcagaatcttgaagggtctttgatgccacactttgccttttttttttttttttttttttttttttttatgagacagagtctcacgctgtcacccaggcgggagtgcagtggtgcaatctcagctca

SEQ ID NO: 95569 - DNA, 21045 bp, Homo sapiens
ggtacagattagcccatctgggacagcgagagggatgatgggagagtttggtgaagggatgttttatgtcattgccttttcaagaggctaagagaaggttgtgatggtgggatgctcactcagaccccaggaaggaggaggaagtgaggatagaggatgtgcagcatgtgggctggtgtgtttggtggcccctgtagagagcagaatctagaaaggagaaatctcactgttgtttgcttccatccttcaggggttccttgtggaggctcacccagacaatgcctgcagccccattgccccaccacccccagccccggtcaatgggtcagtctttattgcgctgcttcgaagattcgactgcaactttgacctcaaggttgctraatgaggaaggggagctgggcagctgagggtaaaaaaaaggcaccaggaatgaagacaggtaaggcccatgatggctccttgtcctctgccttgtctccctaggtcctaaatgcccagaaggctggatatggtgccgctgtagtacacaatgtgaattccaatgaacttctgaacatggtgtggaatagtggtaaggctgggggaatctatacagctgggctttcagtaggacccagagatggtgggaaggctgaaggcctcaggaaaagaagccaatcctttaggtggggtggggccaaagtgcaagatgccagggttcccagaggatttgagtagaaggttgtgagtccccagagtaacaccttgatccctgcagaggaaatccagcagcagatctggatcccgtctgtatttattggggagagaagctccgagtacctgcgtgccctctttgtctacgagaaggggtaggacatgtgcctccttcccattcttccttcagcaagcagttccatgccaacctggagcccaggcctcctcattacccgaaccattcagcctcctgtccttccttccctgcctctttgactttcttcccattcctgtccccacctatgggctttgtccagagccagttactttgtccctctttttttctccctttgcctttctcgccctgctgagactggtcatccttttcccagggctcgggtgcttctggttccagacaataccttccccttgggctattacctcatccctttcacagggattgtgggactgctggttttggccatgggagcagtaatggtgagtagctgagggaacatgatgggaagcactgaggcctgtgaggccagactggatctggagttgggagatgggagtggcttgtcctagattgtctagttttgttcctaagccttgtccatccacccccgcttcccccagatagctcgttgtatccagcaccggaaacggctccagcggaatcgacttaccaaagagcaactgaaacagattcctacacatgactatcagaagggtgagggggttaggggagaagagggcttttcccacagtttacctggttctgaaggactttgagcccagaagatagggtatacaaagatggcagtggccgggcacagtggctcacgtaatcccaagtgcctctaatcccagtactttgggaggccaaggtgggcaggtcacttgagcccaggagtttgagaccagcctgggtgacatgataaaacagaaaagtcccagcactttaggaggctgaggcaagtggatcccttgaccccgggagttcaggccagcctgggcaatgtggtgagaccccatctctataaaaaaataaaattagctgggcatggtggtgtgcacttgtagtcccagctaattgggagactgagacaggagaatcacttgaaccaggaaggcggaggttgtcgggggctgagattgcaccactgtgctccagcctgggcgacagagggagtccctttctcaaaaaaataataataaaaataaagatggcagtaggaaggtttcagcttgagatgctgtcttttcttctgtttttatgcataaatacaacgaagacgggagaggagatggaaagcaaagatgattaagtgaaataattgtgggaaacaatagagggacagactttgcttataggggatgtggacagagcagaaaaatgggaggaatggggaggattcagttagagaaggaagaaaccggtaccaaggggctggggctttaggccctggggcctccagtgcccgtataaggctgtggcagaagccctgcccatttccgttccttccactccctatctccaccctcacacctccccaaaaacccacttcccttcttacctctgcttctctttgcttgtcccttctagccctaaattcttccatgttctgccctgaccttatcctgcctacctgtcttatctcttccactggctttgtaggtgaggggaaatttttgcaaggctttaaaagccttagccctgggtcattgtggctcagtgaaggactagattattttctttctgtcccaggagaccagtatgatgtctgtgccatttgcctggatgaatatgaggatggggacaagctgcgggtactcccctgtgctcatggtgaggccctcactgcctgcccatgcccctctgccaccagcagccaccaggtgcttcaccttgttcctctctgcagcctaccacagccgctgcgtggacccctggctcactcagacccggaagacctgccccatttgcaagcagcctgttcatcggggtcctggggacgaagaccaagaggaagaaactcaagggcaagaggagggtgatgaaggggagccaagggaccaccctgcctcagaaaggaccccacttttgggttctagccccactcttcccacctcctttggttccttagccccagctccccttgtttttcctgggccttcaacagatcccccactgtcccctccctcttcccctgttatcctggtctaataaccccccacacatacacctctggtgacctatttgcacagaccgtcgtcttccctccagtcttytgagggataggggacattccatcccaagcttctcccttacccacacctatccttttgaggggctttggggtggrgctggggcaagcagagggactgggtcttcacttcttgggctaataaaattgtttctttgtggactaaggaagggtaagatcattctcacacaggtgaacttaaccctttggtggaatcacccctttagccataaggagcaagggaatgctgagagacactaacctatagtcatggggacagccccagccggcatttgctatgactcagaagggggagccccacccacaaggatgactcaactagccctgccttgcctgcaggcctgcacccattctctggtccagatggctctattccatcatccaccaatttgaccagcacactgaggacttaggcctggaaatgccactgtggaggggcagggccacctggccagaagctcaaattcctgcaccttgtagtacctcaacctccctgctcccaagccacgataaaggaggcaagtcacagtgcctatcccccattctgacacccaagctcaaatcacacagcaccttgttagtagaatcttttttattcagaaaaaaaaaaccccaaaaaacaaaagttttccaaccacacacgggagggatatgggtagggggaggtgtctgtccatccagccctggcccccagcccatgtgrttttggcagcaataaggggtatggggtaatggcccaaaaaataaaatggtttgtgtgtgtatggggaggaaaggggtgcaaagctgtggggagsggtgaaggggaagggacagacgaggtcagtaytgggaacgccgaaggtgggaggccatttcataacatttcttgttgatcaaaccaccgtggacaccttctttgcccatcagcargactagcgctggaggaggaggaaagagaaaggaggctaggatccaggtgtcacaattccaccccctgccagctgttcagcagctgtccagccctgggggytgtaacccaacctcatctctcccaacccgcccccccaccacacacaggcaggctgtcagtcaccctgaaacaataaggcttttcaaaagaggaaaatcaagcttaaacgctggagaggaacagactaaaaacttaggggtcaaaggctcatagactgttgattcatgtgttcaggctagaaagggctgtggatgtgcatgccacctccaggttctaacaaaagaactcaaacgatgaactcgatgattcaggaccccaacaatctacctatactcctagaaaacagtttctaatccgagctcaaggcagtaagtaatttaagaggtaatgcagttcagcaacttcgaattacaagatgaggaactgagacagaatggagggactatcccatgttccagcatccagcagacaaggaacacaatactggtctgactcccttcatgttggggaatcacacaaaaaagcaccctcaagattaccagaaggcggtacattagagatcttggagctaaaggaagggtaagactcaggaactcactcttgtcagtcttggtgacagtgacattgaaggtgggggccccaccggtgctcttggtacgaagatccatgctaaattccccatcctgcagcagtgagtcccggatcaccgaacatttctggcccccaagtgtcagcccattcacgtaaaaacttgaccggtmtttgccaaccaggacacccacctcagctggctggaagaggaaccaagcgcccatcaagttagtcagtgcaccaagattcccaccgtgttctccaaagacccacctgtcttccacttctgagaaccaccccgccgtgggggctaagtataaattatatactcagtacacatcaatgaactgtgagaaactctgaggactgtgggacgttagtgcagaaaaagatcatgattctgaaacttagaatatggaaccagggaggaagggatgacatactcctctagagatttagatgtcagtgttaatggggaaagtaaacccaggaaataaagggagtcagtgaggtaagtgaggagcctttggatgctcagaactctccttcaggaaaagcagaagcggagaggggaagggaggggggcgggcgaggcaagagaagcaactttgcccttatttggtcaaaggttctgcaggagctgttagggcccggacgcctgggtctccaagtaacctagagtttagctccaggtatctctgctctgagatgaggaagcagacccctgggggctttccgsgaaagttggaaaacttttgaaggtggacaggggccagacccggcaggccagctctcgggtctaggtaccccgggaacctttcccccctccccctttcaccccaagcccccacatccggtcccctcccgcccggaaacccccttccccccccttttgaacttccgctccccctccccacttccgggcagtgtggacagggagatggtggtgggagcagcggtagtaaaccaatatactttcgcttatgctgtctcagaacttctcacaaagttcccctgctccaggccccgccggatggcgggaagggagggcgaggggacttccgggattggcctcgcaggaatgttgaatccaacgtgctgagctgggggggcgtgtggtggcctcgccctctctaacggagttaggaggggccagragcccacagagggtgggcaagggaccaagaccacgcgcctggggctcccttccgcaccaggagaaacaatggtagagggacgcgggctggcagccggacggggagctgggggtccaaggatccccgggtcccctctcaatcccaatccccagtaaaaactgaggcgcgtccccgccccgccctgggagaggcggaagtgggccgccgcaccgggcgccgcgcccctccccgccctgtgccccggatgtaacgccccgtcgcggaaagcggggtagcgggcgggatgggcgccgccgcctggggcataggacctacgggcaactgagggacccactcacgtgcagccgccattcgcgccgcttccagggcaagcacccagtcagggcctctcgctgcgcgccctagaccgcgcccgcccccacccaagtccctccctcagggtccaaaccggagcagtgccccggaccgcgcaggcctcgcagtaccgtgatgttgacgaacgttttcccggggacggcggcccagacggagggcgagtccttgtagcccacgatggccgcgtcctgacaggtcccgtccgccatgaggttgtcgatgtaggcgttccacccggccatggcgctgctactggggctgctctcggcgctgctgctggggccgcggactgggctcgasctgcctcggctggcgggcggggggaggcggagagctcggggcacgcgctgccgtccggaccgcggctccgctcgctgtgcagcagccctcgcaccgccacttcctgctcctccccccccccgccccgctagatttttatttgcaaaggacggtaggggcggggcctactccccattccctccctcccccactcgccagcccagacaccgaactttgcaaatgcaattttaaaaatccctccccctattgcaaaatttgcagagttcgatggaaagcaatgcagaaggatggggggtggcgggagagaggtgaarggtagggtttgctccaatttgcactgaatataaaccagactttggtatcggggcagggagtgagccagaagaaggaaggaaggagaaagcaggaggaattagcaagctgcaaatttagcaaattaaggagagttcggggagcccagggttaaacgggatgactcctccttcccccacctccgccgaagggaaggaccggcgggcggcggcgcgtgtgcccgcgcctgcgcctgcgccggggccrggagtgcatggggcggtcggggccggagccggctgcacgggagcgcgcccggcccgacccgtgtggaccctgcgggaaaggaaggcgggctggggacgtgtctcccgcctggcggaaggggcgggggcgaagccgtgcgcgctgccgcctcaccaccyttgattttacttattcaagtaataagaaagcaaagaagagtttggccaaatcctctagtcgctctcatagctgaaggcacccaccggggccacttctgtccccagcgtcttctcgggtcgtgcaggttgggttcaccagggcccattctcagtctagaggattgtcccttctctggatcggctctagcccagggcctcaccccacatcccagccccgcccgccccaggcaggcaatgtctggatcaccggccgtgccccttggcctgtgtctgcagaggtcacagagcgcggacacccgcggggcttaacaggcggggctatttttcgaggcggaagaatactcaagttgcaagagtggcaactttttcaagaaggggaaagtcccacttcgggccctttgggtttcttcgcagtcagatgtgcgctcacagccacctggggagggcgggacgggcgggacggccgtgcggcggccgcggtgaaaccgcctcctccgacccgccgccgagggctgggcggcttccggagcctgggctaggggcaaggggtcacmgagcgcggcccgggcggaaagggggttggttttctctctcctcccgagcgcggcgcgcatccctggcgtccacgccgaatcccacagtccycgacgcccctcgagtccgtgttcctcgacagccgcgcggctgagtcactggcgggctcgggcggggccgcacccgggcacgtggcggcgctccccgcccgccatctcctgacccctggcccaccgcacccctaccccagggtggaaaaatcccgggaggagcggcctgagatgagggggcggggcgagaggggagactggacgggtggcggggcaggtggcctggggtgggggctgggaggccgcgcgggccggcggggcggggagcaggggtggggagagggcggcgggggtgagtcaccgggcgcgcgctgccccggcgccgacgggaagggcctccgagtcgggccgaggcgccgtgtgtcccccgccggtcggctggtatggctgcagaggagctcggggcagaccccgcactggccccagagccggcaaagtggagatctctaccgagggcagagacctacctccccgcagtgctacaagtggggcgccggaagagccccaggcgtgcagaagctcacaaaaggccacccgtcctcggtccattcatttttgttcactgttgattcagccccattcattgatgggctggggccgtgcgctgagcgcccacagtcgatggggaaaggggctctgaccgacagtccccacgccgggcgacaagtgctgtcccagcgttatcagtcgggcgccttgccagccgaaagggcctgtctaaattcgtttcctgtcccctaactcatcccggcgctggctggcctggagagggtaggatggggyggcgccgagaatggccgttatgaggaccctaagaggtgagaccctctcgccttctggggtggggggtcccgtcctttcccccactgaggacagaggcccgcccagcgatctgagcatgtgtggacgtcaatcttgcagcccctcttccaggccccctccccagccttgcagggctcaggttacccctggcctttcctaaaggtcactcattcctcttgacgtttgcaaaaggggaatgtaatcctggggtggggggagacccctcatctgtagcccctcccttgctcctcccaaagggtggaattagaacagggactgttattgggagacagaaagtgggggatagtagttgacctttggtaagggggcaggtgcccagggccagaggcttctgcttcaggctgtagtgggcacttggctgccagcccagtgtgaaggggggaggatggagagaaagagaggcggggctggctggggaccgagtggctcagggataaatgcgcagcctgagagggggtgagctgacactgtcccagctgccacctagactcggagctccatccaaacctccagcgaagacatcccaggtygggtgaatcttccagccctgggggtggaggtagtaaagggtgagcatggtattggcttggaggaagtgggggacatttctgctttttttcctcctgggactggagatgcttgaaaaagctgggggaaggggcggctggagcaagcagatgggacaaactctgggaacaccgaaggatctagggaaaggaggctgtgaggagggcagcagggatggatagaaaagggcagctagagctggaacctgatagggaattgggggcccaaggagatttcggagcaggaaaatgagaaccagaaaggatttgaaggccaccagccatggagaacagactgcttgaccagaggggtggaaggagaaggcctaagtggaggcttgggggaggtgggggcttggtgagcggtggcatcccaggagctatagataagaggcccctggattcttaggatgggagggtggaataagagctgttctgagtgggggagggggctgcgcctgcctctttggtctgtgacctttttgtagggtatttttagctccagcacctgccttcttggagtggggaagaatcttaaagggcaagggatttctggttccttaagagatcaactgtctacactcactcacacctcctgtcctgcagccatggccatgcagaaaatctttgcccgggaaatcttggactccaggggcaaccccacggtggaggtggacctgcacacggccaagggtaacacaaggcccattggataggctcgcctccgaagaccccaaccctttggcctttgccccccagttctgtgccatatcctctcctttctctcgggttccctttcccagacttcttcccaagcccccttcttccaacgtggaaccagagctggaagctaggagaagcaggagtctctctctgcactgcctcctgtccctgagctcagagaggacacctcagccctttgagaggtagagagactccctgtgaggtccttttttttgttttgttttgttttgagatggagtctcgctctgtggcccgggctggagtgcagtggtgcaatctcagctcactgcaacctctgcctcccgggtttaagtgattcttgtgcctcagcctcccaagtagctgggattacaggcctgtgccatcacgcccagctaattttttttttttttttttgagatggagtctcactctgtcgcccaggctggagtgcagtggcgcgatctaggctcactgcaagctccgcctcccgggttcacgccattctcctgcctcagcctcccgagtagctgggactacagctaattttttgtatttttagtagagatggggtttcacggtgtcagccaggattgtctcgatctcctgatctcgtgatccgcccgccttggcctcccaaagtgctgggattacaggcgtgagccaccgcgcccggcctcagctaatttttgtatttttagcagagacggtttcgccatgttagccaggctggtcttgaactcctgatctcaagtgatccacctgcctaggcctctcaaagtgctgggattacaggcatgggccaccgcgcccagccatccctgtgatcttccaattcctcctgtcccaggccgattccgagcagctgtgcccagtggggcttccacgggtatctatgaggctctggaactaagagacggagacaaaggccgctacctggggaaaggtgaggagacaccagcgcagaaggagcctgtgtgggcggctttaggacatgggtgcacaatgggtagaggactggaacccccaaggctcttgaggagctggggtccacagaaaggggcccagttgaytgagctccaaaactcatcctctggcctgtctaggagtcctgaaggctgtggagaacatcaacartactctgggccctgctctgctgcaaaaggcaagtggggaagcccrctcgctgcagcctcctccccatgcccctgctccctcagcccagasaggcctctcccgaaacattttcccttatccttcccctgcatgtgccctgacttctgagaaatctgacctctgctctcccttctcaaactcacccttccagaaactaagcgttgyggatcaagaaaaagttgacaaatttatgattgagctagatgggaccgagaataagtgtgagtgaagggctagcggtggggaagggatgaggtgtgggagagatggcgagaggccatggggtgaggcctgatgggttatttctgggtcccccattttgggtcacaccgcagctggatggatttgtgttcattccacaggcatttcctatgcctgccttctgccaggcctgggscgggctgtggacacagacatgcagctgacacattcccccggggtgggggttcccagggctactcaggctgttggggagagatctgttaaccaattcttcatgctcagtggtttggagctctggcgtcttcctggagtagccaccccaaaccctgcagaagctctcatcctttcttcccgcttgcctccttccagccaagtttggggccaatgccatcctgggcgtgtccttggccgtgtgtaaggcgggagcagctgagaagggggtccccctgtaccgccacatcgcagatctcgctgggaaccctgacctcatactcccagtgccagtgagtgcagctacccgcccttcccagatctcgcctggacagagccaaccccgcccagccagggttggcccccctggaaaatccacctttcagaccagctcctaagaagcagtttcctgaaattgaatctctcctgctgtggtcccacccctccctctcttccacaatccaaaccttccctgaaggctctatgtgcttccttccctgccatataacccagttccttcccattccaatcctaggctcgataactccagcctcgttccaaccccacaccctacacccaaatcatattgagagtttctttgaggcaaagatcttggcatttctttgtatcttcttgagtccttcttaaaccagtgccttcttgatgaatggaaactctttgaatttaatctcaataataatgttaccatttcttgttacttactaggaggattgcataagagcatggtctctagagatagattgctgggtttgaatcctggctctgcctgttattagttgtatgattttaggcaagttctttaactgctctgtctcagtttccccatctgtaaaatggggggtaataacgataccaatgaatagaggtgttttgagaatgaaatgggctaatacatgtaaagtacttagtgcgtggcatgtagtaagtgctatataaaagtgttagctattatatactaggcacatgctaagaactttacattcaatttctctaattttcagcaaaagatcctacagggaagtaggtgctatccccattttacagaaatgaggaaagagaggctgggcacagtggctcacgcctgtaatcccagcacttcgggaggccgaggcgggcagatcacaaggtcaggagttcgagaccagcctgaccaacatggtgaaaccccgtctctactaaaaatacaaaaattagccaggcatggtggcacccacctatagtcccagctactagggaggctaaggcaggagaatcacttgaacccgggaggcggaggttgcgccattgcactccagcctggtgacaaagtgagactccgtctcaaaaaaaaaaaaaaaaaaagaaagaaatgaggaaagaggctcttgagcaaaactactcatcctaraccactgagctagtaagtagggaagccaggtttccaccccaacaccccccgcccctgtcccttcttgagctctcatgccccggcccaggtccagacaccctctccccatctcaggccttcaatgtgatcaacgggggctcccatgctggaaacaagctggccatgcaggagttcatgattctgcctgtgggagccagctccttcaaggaagccatgcgcattggcgccgaggtctaccaccacctcaagggggtcatcaaggccaagtatgggaaggatgccaccaatgtgggtgatgaaggtggcttcgcacccaacatcctggagaacaatgagggtcagtgctgagcaccctggggggcakaccccctggatctccacatgggcaggggaggctgcagacaaggggcactggagtctcaggtcctttcttggtcctcccccagccctggagctgctgaagacggccatccaggcggctggttacccagacaaggtggtgatcggcatggatgtggcagcatctgagttctatcgcaatgggaagtacgatcttgacttcaagtcgcctgatgatcccgcacggcacatcactggggagaagctyggagagctgtataagagctttatcaagaactatcctggtgaggcgttcgggtgtcccagtgttcctgcccgaatcccgtgcagctgcctaatatactgatttcagtgacctgctttgccatcgacttggatccttccaattcttagccccattaaaatccccatttaagctcttctgccctgtcacccctccatgaggctccttctgacctctagccgtgtctctgccctgtctctgccttgtctctgcyctgtctctgctctgtctctgcyctgtctctgcyctgtctctgccctgtctctgcyctgtctctgccctgtctctgccctgtctctgctctgtctctgccctgtctctgctccaaaccccaccagtggtctccatcgaagacccctttgaccaggatgactgggccacttggacctccttcctctcgggggtgaacatccagattgtgggggatgacttgacagtcaccaaccccaagaggattgcccaggcyrttgagaagaaggcctgcaactgtctgctgctgaaggtcaaccagatcggctcggtgaccgaatcgatccaggcgtgagtgcctcctgaccctgaggctcaccatagcctgcctctgccccagctctgcccactccagctacagtcttacccaccaactccaagcttacctttcccctggcacctgacttacccacaccttgatctcaagactttgtttgactaatccttggcctgactccaagagctttgcccctgtggctctgtcatgaccccccacccccagcccacaccattcctctctcagattccgctgttctcagcagcatctcaagagcccgaaatcaagataagtcttttcctctcctacttcccaaagaacttagtcactgccctccctgcagagtgcttgctacccaaaacagaagggagaggccccacccaacccctgctttcccactgaggaggttctagaaggccacatcaaatgtcctctccactcaggtgcaaactggctcagtctaatggctggggggtgatggtgagccaccgctctgrggagactgaggacacattcattgctgaccttgtggtggggctctgcacaggacaggtacttgtagcttctctctactgagtgtctcaccaagttytcttggggtccctggcctcctgcctttgaggttaatgctcccttggggccaggtccaacccctcctttccagcctcacctaaccctccaaattcttcttccctcatcagatcaagactggcgccccctgccgctcggagcgtctggccaaatacaaccaactcatgaggtrcagcgggaacagtgggcctgggcattggggtgctggaggctgttaggttggaagttcagcagccctaaycttgcctgcattctaggatcgaggaggctcttggggacaaggcaatctttgctggacgcaagttccgtaacccgaaggccaagtgagaagctggaggctccaggactccactggacagacccaggtcttccagacctgcttcctgaaataaacactggtgccaaccaagacagctgtgtgcttctttgtgggagctaggggatgctggtttctgggctgagctggggaaaacaggaggtggcgagatgggggcggggaggggaggcaaatagatatgtaacctgctaggacaaagaggaggtgagggactcacagaggaagctgggtggttctagaacaacagaggtgttcacatttccaaaggaggtaggggaagcagatgctatatggtaaaatgaagctgcagagttgccaatggagccgggcatggtggcgctcgcctgtagtcccagatacctgggaggctgagttgagaggatcgcttgagcccaggaggttgaggctgcagtacactatgttcgtaccactgcactccagcctgggctgcagagcaagaccctgtctcaaagcaacaacaacaaaaaaaaacaaaaacaaacaaaaaaactaaataaagagtttcagagggaataagaaaccagctccaggagaggggagcagggtggggactggggtcctgccaccaccatgaaggggaagctggctgtgaagtaaatggtctgcagaggatgctagagtgaggctgcagtcctagggagggctttgtgaggatgagagtgataatgacagtggctgcctctcctatagaacttacaggatcttggcagggcacagtggctcacgcctgtaatcccagcactttgggaggccgaggcgggcggatcacctgaggtcgggagttcgggaccagcctgaccaacatggagaaaccccatctctactaaaaaatacaaaaattagccaggcatggtggtgcatgcctgtaatcccagttactcggaggctgaggcaggagaatcgcttgaactcgggaggcagaggttgcagtgagccgagatcgtgccattgcactccagcctgggcaacaagagcaaaactctgtctcaaaaaaaaaaaaaaaaaaaaaaagaacttacaggatctgaaactgttctaaatatttgacatatattgccctgtgcaattgttcaaacagctctgtcagatagctgccataattatccttattttataggtgaggaaacctgaggcacaaaaggttaaatgccttacccaaggtaacggttggcagctggcagggctaggatccaaagccaaggtatttgactccagcgattatactctcatgtatttattttgagccagcttcttgatctgtcacccaggcaggagtgcagtgatgcgatcatagttcactgtagcctcaaactcctgggctcaagcaattctcttgcctcagcctgcaaagtagctgggactacaggtgcacaccaccaggtatggctaatttttaaagtttgtatattttattttctttttgtagagaaggtttgtggcctagactgatctcaaactcctggagtcaagcgattctcctgccttggcctcccaaagtgctgggatcgcaggtgtgagccactgcgctcaaccaattttttaattttgtagagagaaagtctcactatgttgcccaggctgatcttgacctcctgacctcaagtgatcctccagccttggcctcctaaaatgctgggattacaggtgtgagccactatgcccagcccgattgcactcttaaaatacagcatcttacaaaaccctctgggccgggcacagtggctcactcttgcaatcccagcactttgggaggctgaggcgggcggatcacctgaggttaggagttagagaccagcctggccaatatggtgaaaccccatctctactaaatgtacaaaaaattacccgggtgtggtgacacatgcctgtagtcccagctactcaggaggctaaggcaggagaatcgcttgaaccctggaggcagaggttgcagtgagccgagatcacaccactgcactccagtctgggcaacagagaaagactctgtctcaaaacaaacaaacaaacaaaaaacctctgatagttccaactggccatctttaacctacacaaacagcaattttatgctgttcaactgaaaattattccccttcttctctaccagtggttccaggacccacctttctgtgtataaacaaaccaggacattgggttaaacagtatttattgaatgtaaagtaccccagccccatggggaagaaaattccaagaacggggaataatacagattaaatacccacctgtgcattcacactctcacacacacacacacatgccacgcacatatccaagctccaacggtgacaaatcaaacacctgttttcccccagcctgagggacagctggtaggaggtggttcagaggtggggctccaggatgggctctaatagcagcagccttgtctctccctgccccctgccctgccccaggggtcaaagggagctgggcggggcgcctaggaggttggcggcaactcttccccactctgccgcagacgcttcttggctctgatctcattcatagcctcttcaatggagcgtgtgtccctcttattggccacgggcactaggggcagagaggagggtagrrcgggcctagaaatccgtacctcagcctccactgccctcctgccgcatcctatgctcctctcccagccacccccagccgcactgtggcctcaccacagccgtaggtcttattggcctgtagcatgtgggctgcgtctttggctgctcccttgccgatgaggtggctgtacttgtccttgtagtcgctggcagggctcaccaccacaggcccctgctgggctgcctcctcctcttgcctctgggccagctcctaggggtgaaagtgggggcactggtgctcagggccccagcccaaacccccacccctcccaggtggtgggcttctggaccccaagggctgcaaagcatwgctcaccttcagcttccgcttctcctcagccttctgggggtcccattcctctccacgacggtaagagtctagctcttcatctgagggtgcaaactcctgragaagagcagaatgatggggtcagagtccatacaaatgtttcatttcattccttggtcggggaggggggataaggctacaaaggggagaggagagaatgaggaattcaggccctttacctttttgaagatcatgacatagcgacagtcatcatcttccccaaaggagaaggatgtcaggccagccacttccaccacatcatgtctgggatgggatggcagaggggaaagagcatcttgagccaggagcgggcctagtgccctcctctggaggagccccccgctggccctttcatgccccgctagccacccatttccttcctcccccagcccagggacactcacagtatgctcctctcgatcttgttcattggctgaaactttttcttgatctgcccactgtcttgaatgaaatctgacacctccttctccatcttgggagaggggaaaggaagcagatatgagacaatggctccacccaagtacccctctccctagctgagcctgggcccttctacgcctccccagcaccctccccagcctccaagccactggcttccatgcgtcacctctctcaagacattttcagcaaaactgagtcctcaaccttccaattttaacttattggaagtccttcctgagtctgcctttgatcactccagttgttctcacccttttacgaaactccactttctgttgtttctcytgctcttgtagtttcttcaggcgggcggcctgttctgggggtgagaaatggcaacatgaagccagggctggaagcatgggtgggaaaggtttctaaggcttcaagtgaagtgtggtgtccactgggaggtgtcaggctgggaaggtaggattagcgtttattcatcaagcatttattgatgtttattctatctaatagtcccccttatccacaggggttcattccaagaccctcagtggatgcctgaaattgtggatagtactgacccctatacatactatgtctttttctatacatacatgcctatgataaagtttaatttataaattaggcacagtaagagattaagaataatagaccaggcatggtggctcacgcctatatcccagcactttgggaggccgaggcagacagatctcctggggtcaggagttcgagaccagcctggtcaacatggtgaaaccccatctctactaaaaatacaaaaattagccgggtgtggtggtgggcgcctataattccagctactggggaggctgaggcaggagaatcgcttgaacctgggaggcagagattgcagtgagctgagatcgcgccattgcactccagcctgggcaacaagagtgaactccgtctcaaaaaaaaaaaagagatggccgggtgcagtggctcacacctgtaatcccagcactttgggaggccaaggtggatggatcatgaggtcagaagatcgagaccatcctgactaacacggtgaaaccctgtctctactaaaaaaaaaaaaatatacaaaaaattagctgggtgtggtggtgggcgcctgtagtccccactactcgggaggctgaggcaggagaatggcgtgaacctgggaggcggagcttgcagtgagcagagatggcgccactgcactccagcctgggcgacacagcaagactccatctcaaaaaaaaaaaaaaaaaaaagagattaagaataacaataatacaatagaacaattataacaatgtactgaaataaaagtttgtggctatgctctctctctctctcaaaatatcttactgtatataacagttctggactgcaggtaactaaaaccttggaaagcaaaaccttggataagggagaagtagggactactgtatctggcaccaggcgagaccctgaagtactgagattattaagacacaatgtggcccttcaagagctcccagtttagtgggagtgacaaagatcagaataatgcttaaccccctttcccaactccactggggaaaccaattaacaaatatctatttatttatttatttttgagatggagtttcactctgtcacccaggctggagtgcagtggcatgagctcagctcactgcaaactccgtctcccaggttcaagcgattctcctgcctcagcctcccaagtagctgggattacaggcatgtgccaccacacccggctaatttttgtatttttagtagagatggggtttcaccatgttggccaggctggtcttgaactcctgagctcaagtgatccccccgcctcaccttcccaaaagtgctggaattataggcgtgagccactgcacccggcctatttatttttgggacaggatatcactttattgcctaggctggcgtgcagtggcacaatcacagctcactgcagccttgacctccctggctcaagggatcctcctaccttagcttctcaagtagctgggaccacaggcgtgtgccaccatgctcagctactgtttaaaaaataattaaaaatatttgtgagatgaggtctcactatgttgcccaggatggtatttttattttattttatttttatttttgagacggagtctcactctgtcacccaggctgggtgcaattagcacccagctaatttttgtatttttattagagacggggtttcactatgttggtcaggttggtctcgaactcctgacctcgtgatccgcccgcctcagcctcccaaagtgctaggattacaagtgtgggcccaggctggtctcgaactcggcttcaaataaccctcccacctgggcctctcaaattgcttgaaagccttgagcctctgcacccagccttggctaatttttttttttttaagttttctgttaagatggggtctcagtttgttgcccatcctggtctccagttggcctcaagtaatcctcccaccttgaccttccaaagtgctgggattataggtgtgaaccaccatgcctggactatagttagttctttgtacattgtgggcattaaataaatgtttgggctgagcgtggtggcttacgtgtg

SEQ ID NO: 95570 - DNA, 96109 bp, Homo sapiens
gttaataattataattatgacaagtctttgtatgcacaaaagtaaccaaaattcctagtcaattgtgactttaatagtgactgtcctaaggttttttgtcatccacagacaagtgttatcttgtattgttcctcttcaaaaggtggtttataatcaactatacgactttgacaggtgctcttaaatgcaggtttctgaataacttaggagattgtgacattagaatagaggaaaaaacatttaggactctcatggagagctgaaatattcatgactatcaagcagaacaggagtcaactgcatggagtaaactaatagaagcctgaagtaatctttttgactttttttcttaaagtgttgctgatcctttgttttgtttttcacagtcaagaaaacttttatttacaacttgtagcagctgagtatgcctataaacaaaatttgaagcatatttctctctacctgatttctccagaatttggaaactatttgtgagtattcttatggcaatatagttatttacataagtgcagtaagaatctgttttcttttacaacaggacacagttggaggaactgattattttaccaagcctttgactggaatggcatgctttcaaatataaacaaactgcttcaaggaatcaaacttgacttatagagacaataaaagccccttgggaaaactggcctcataccttgtctacacagtccttgtacagggttcttggtctgtaataagtaaagaatgcaactttctgagaggcccaggagcaccaatatcttgggacctcaggaggagaggaacttacccaacttacaggtatttgatggcagcaacccatggctgggctcagttttaaaaaaagtcttatttaaaattccttatagaacaaagatccatcaaatccaattacaaaaaaaaaacccatgtgaaaaataattattcttgctgccctttttacgaagaatcaggccaagtataaaactaaatttatttagttggaagcaaatcagtcttaccatgatttgtctttaataaaagtgggagcctgaagagagaaaaaagttatgtttcaactatggtacacctgttattagattctagtctcatcagttatttttaagggtttttttttccttgcaatttagactaaccctactttttcctgccaactaaccagtgatctctggctgctgctcagaaaaaaaataacagaaatgggtaatgtaaaaatctggatcaatattctaattctaattggaacatatagcatgtacagcaacttcatatcagcttgcccagttccagctgttgccgagttcatggaaagccttctaatttagtttacttgggatagttttacttattttgctttaccgttgtggaacatattgctgttgtactccgtgtgggagtgcaggataagcttactcaatgtttaattaaattgaatactttttaatcttccagatatcaccttttgccctcaagagttatgaatgtccctcaccatggtgatgccttctgactgagctcctcactaccctgaatacaagagaccataatagttaggtaggagtagcatagcccttattcagcttgaagaagttacagaagatggatctttgtccctctactaccctttggattaggcgttcccttgtaaaagggaagggagaaatatgtcagaggcatttgaaccagagtgattccatcttgaattggggctgggtgaaataaggctgagacctactgagctgtattcccaagagggcaggcattctaagtcacaggatgaggtaggaggttggcacaagatacaggtgacaaagaccttgctgattaaacagtttgcggtaaagaagctggccaaaacccacgaaaaccaagatggcaatgaaagtgatgtctggtcatcctcactcttccttatatgctaattataatgcattagcatgctaagagacactcctatcagcacatgacagcttacaaatgccatggcaatatcagaaagttaccctatatggtttaaaaatgggaagaaccctcagttctgggaattacccacccctttcctagaaaactcaggaataatctaccccttctttagcatataatcaagaaataactataagtattctcatcaagcagcccaagttgctgttctgcctatggagtagccattctttattcctttactctcctaataaacttgctttcactttactctatggacttgccccgaattctttcttactcaaggtctaagaactctctcggcatctggatcgggaatccttcctggtaacagttcacaatggatggttttatacattcattgcttttaagcttgctgattcatttattcaacatacatttaacatgtttttctagtggttgccaacacagttctaaataatatgcttttgcttcttttttgatttataatttttacaaagtatttattgtgtttccaatacatctaattatttttcatgagttttccccatttataaggatcagagaaccaaaccggttttgttgcactgccgttacccagaagttttgaaaagtgagagtcaactcagacctctgttctgtaggtcattgggagaattccttatattgaacacgaaatgtgaaataaaggcgcaaggatgaatatggtcatagttaaacaagttaacattagtaaagcactcaagacaatgaaaccacctttgcaaaaattatatcagttagaaaattatgacagtgaaagaggtctgagttaacgcccccattccaacacctatcttgcctttcccttaattatttctaagctactggggccagctaactttgagagacatttaggctatagtttacatgataacagaccttgcctgaaactcaactgtttttgtaaagctaatgggaagctatcaggctgtgggggaggagaggagcctgagtcctgctaaggcgcagatatgaacgattgtcagtcattattctggaggttataagatactcaactttcccaattactcctgcaaataacaccactgatatggtttggctgtgtccccacccaaatctcatcctgaattgtagtttccataatccctacatgttgtgggaggaagccggtgggagataactgaatcgtgagggtggttacctccatgctgttctgatagtgagttctcacgagatctgatggttttataaggggctttccccctccttcactctgcacttctccttgctgccaccatgtgaagtaggacatgtttgctccccctgtcaccatgattgtaagtttccagaggcctccccagccatgcttaactgtgagtcaattaaacctctttcctttataaattacccagtcttgggtatgtctttattagcagcacgagagcagactaatacaaccactatttgtagctttttgagatatctttccaggttttttgcatgtctgacacccatggctccacctggacagccaaccccactcccacagccccacccagaagtgattcagactgcaggaggacagctttgactccccctatgatttcatctcagcctcaaccaatcagcagcaagcacctgttacctggccactcccaccccttcctccaaactgcgtttgaaaaacccccagcctatgagcttcggactttggatcagatgacctgagcatgcactccatctcccacctggcatggtcggcctcgtgtctattaagctctttttctaccacaatgctatggtctttctttatgcagtgggcaggaagaaccccttgggtggggtgtttaaaataatgcccagcttagagtaagggctaggaaatggtagggaaaatggattaaaatccaaatcaataactactataataatgacattagaaatattggtttgggggtacacaggagatgcaagagcctattgctgtcagagggtaggggaaagcttcagaaaagagaaactttgtctgagtttggaatgggtaagagaattctaagcagagggacctgcttgtaagatcacagaagtgacagaataacaagtaggggtatgtgggaaaagattaataattgcctctcccccaaagttccagtttatagtttgtccatttctgtggtataaatactcctactatggctgatttcaagctattaatgtgaagtcaacaaaggcagagttggtgctatgggctaaactgggtgccccccaaattcatatgctgaatccctaaccctcaatgtgactatttggagacagggtctttaggcagcaaatctggttaaatgagatcataagggtgagtccctaatccaatacggctgatgccttagaagaaagggaagacagagccctctctctaccccatgtaaggacacagtgagaaggtaaccatttgcaagccatgaggagagcttcccctaaatgagctaaatctgcctgcatttgatcttggacttcccagcctccagaactatgagaaacaaatgcctgttgtttaagctgcccagtctatggcatttgttatggcagcctgagctaaggcagctgggaagaggtgaacagtatgcttgctaggccgtagaagccaattgtagcacacccttcctgggagaagagtaagtagttccctaaatcctgagcataggcatccagggagtgaaggacacaagtgatgcagaaaaattagatggggcaggagtataaaagggcttggacgacttgctaaataacttgggacctcatttaactaaattccctcattaaagaccctatcttcaaatacagtcacattctgaggtcccggggtgggggtggggagtggcggttaggactccagcatatgaattttggggaggggacacaattcggcccttaatagctccagttgtgccaccctgagttgttttcctgaaccccgcccacgtctttgtaaataataactctcaacttccccttttgagtggaccattttttcctgtccaaattctgatataggaagggtctccaaaatagctgcaaagggaacctcagtctcaaaagttgggatccactatatatctgcttttactttcaagcattgaaactaatgtcaatcaactgcctttctattcttaatattttatccaagaaatcgctagaattctttctcctttaaaaaaaaaaaaaagcaagttacaagccgggcgtggtggctcacacctgtaatcccagaactctaggaggccgaggcgggtggatcacctgaggtcaggagttcgcggacagcttggctaacatgacgaaaccccgtctctactaaaaacacaaaaattagctgggcatggtggcaggcgcctgtaatcccagctacccggcaggctgaggcaggagaatcgcttgaacctgggaggaggaggttgcagtgagcccacatcgtgccattgtactccatcctgggcgacaagagcaaaactccgtctcaaaaacaaaaacaaaaacaaaacaaacaaaaaaacccactaccaccaacaaaaacaagttacattgtgggttggggccgctgacaggaggaataagatgatgttatggagcatttcctagtcccctttccgaccccatttccctattgtccgacttcaggcttccaagtgaggacagcacttcccaggcagtgacccgcagtcactgccctcccagaggacgtcctgcctcgcggccctggaaagtccaccttctcctagcaccgatcctgagctgagaagctctgtctggtacagccatcctgcatcgtgggctgcttctttccccaggcgaagctcaacttcctcccattgttctgaacctctgtgtggacatcttctttcttcaaacgcaccacggtaaaattctcgcctgcctcgaaaccccgcctacctctgagatctgaggacggatactaaacgctggacttaaggcaatgtacacatgtaagcaggctctgtaggcactcactccgcccaggtgcgcgcgtggcggagggggaacagagaagcaggacagctctscatccttcccgtgttcagtcgtgggagacaayaagagaggtcacagcctggcgaccaaaaagtgcggctaacttccctgcccaagctgactttctctgcagggttcaaggttaattgtgaggatttacattcgcatggcacacccgcatccccctctacgtggaaatatgtcttaactttcataactgccttgccagcagggtatttttcgctaggggcgaagcgtccttcgcaagccacccagctgaccggcagcggagacagctttctcgccctgctcgcacgcaagtagaaaggcgctgctgagcccgtccctccaaaccacgtggtcttgcccgtgcttaaaaacaaacgctgagccaggcgcatgcgccacgggcctccccgcaccagcagaagtcggagtcgctgttgggggcggtgtctatggttgagctgagggcgcaggcgccacggcccgtcgagctgggttccaaggcggctggcggcggtagcgtctctgtttccttgtgggcgctcgcgcggccctgggtgagtgttcgggggtcccggccgaatgtcgggcagggggtgtcggggcccagctcaggcttctcgggcggccgcggccccgckccttggcctcgccgtggtgattgagcctgtcagcgaggacgcactgtagcgggtcttagggccaagygccsgcttccggcggcctcacctgagaccggaagtagcgccaaggagcgctcacctgaggcggcttgagtccctggccggccagcgacccagctacttctccgactttgtataaggccccctgcgcgcagggtcagctgggtcctttttgatctcgattaaaatgctggagctgttattttaaagagagtcgggctagatgtacgtccgacgttttgggcgttgatagagtcaaattgataagagtgtgggcggatgaggcaggccgcctgtaaatgctgctgttacgtgacttccacgcagcgtcttaactgctgtcatcctgtgacaggcagccctcgcttttctcctcaacttttcccatcatcttcttgttgctttgtctcctccaatccattatccgcacagttgtccaggtggtctctggcataaagtaggtcatgccatcatcagcctacttaacagttttcagagtcattccattgcactgggagtggaatccatgctcgtgttttcccaggccttgtgtgatttggcccttgcctgtcccctctcagaactgtgcctgtgtccgaccaaccctccaaatgagacccagcttgcccctggctgcgggagccccagtgatgggggaggacggtgaagatactagtgtcccagatgattaagccttagaagatactctgcaagacttaggccatgaacggagcccttctctgctcttcttaactcaaagttaaaaataaagtcaaaaattcggtgttccagccttcttgcattttcacaagtgcatcagctctttctagtcttaaaagttacgcacgttgttgggaggccgaggtgggtggatcacccgaggtcaggagttcgagaccagccttaccaacgtggtgaaaccctgtctttactaaatacgaaaaattagccgggcatgatggcatatgcctgtaatcccagctaatcgggaggccaaggcaggagaatcgcttgaacccggaaggcggaggttgcagtgagcctggcggagcctggcggaggttgcactccagcctgggcaaccggagcgaaattccgtctcaaaaaaaaaaaaaatttcacacgttgtttccttgcaagacgttcactttactttcgacctgactgacttatcagatgtcactttatcagagaggcctccttgaccccacatctacctccacaatttcaatttggtttctctcattttgtcagaaagccttgtactttcctcttaacagcagtcaccacaattatatttgtgtgtgtgtgtgtgtgtgtgtgtgtatgtgtatatatatatatatagtttttaaatgtctgtttttcccatgagactctaagctctttggggacaggaattagttaacctagtacattgcctggtgtaattaactctcagtaactatttgttaaatgtatgatttctttctttctttttttttttttttttgagacggagtcttgccctgtcgcccaggctggagtgcagtggtgcgatctcgctcactgcggcctccgcctcctgggttcaagcgattctcctgccccagcctctcgagtagctgggattacaggcgcgcgcctccatgcccagctaatttttgcatttttagtagagacggggtttcactatgttggtcaggctggtctcgaacttctgacctcgtgatcctcccgcctcggcctcccaaagtgctgggattacaggcatgagccaccgctcccggcaaatgtatgatttatttcacttctgaaattctttaacctgataagagccttctggtttccaactctcacttccagaagacttggttttctggccattgccagatactaagtgacttcttgaaccctttctcccatttccaggccccttctgtttttttgtttgtttgtttttgtttttttaaacctacccagcttggaccctgaagtcagttgcttcagctactcttctcagcatcttcaaccccgtgactcttttgcgctaccatttctgctctgaaaaccctcaatagtgacatttcccccaggactactgaaggaggagattgttcagccctggagattgttagcagtctatggctttgcagggctggggagatcctcaggtaggtcctccacagcaatcatcagtgtttgttccctgtcaactcccttttctcttgtacaggacatttattccagactcttagtctttagccccagtgccaactttgtctcctgactcaggaactgcccaacttgctgctttgtgggatattktgtctgtaatccacttcagcttccctcctttccacctgcaaatttagatctatcaggaatcctccttctgccagagtccgagaaagatgtgttgtgcctcctgttcatttctgcttgcgaccttccacttttgctgtctcttttggtacacctttctgggttatctcctctgtctccctccagccattacgtgctctagtttttcttgccctagttctctccctacccccaacaaatccattattactttatcactgtagctgtctcyctgccagaggcaagctctttaaaggacaggccactctcttgtggcctccatttcctcatccactccttacacaccaactacatttcaaccactacagtctggtttttggccctatcgctccactgaaacttttttrttttttcgagacagagtttcactcttgttgcccaggctggagttctgcggtgtgatctcagctcactgcaacctctgcctcctgggttcaagcgattctcgtgcctcagcctcccgagtagctgggattacaggcatgcaccaccacgcctggctaatttttgtattttagtagagatggggtttcaccatgttgggtcaggctggtcacgaactcaggtgatccacccgccttggcctcccaaagtgctgggattacaggtgtgagccaccaagcctggcctgaaacttcttttaccaaggtaaatggtgacccattggtatccaaattcactcagccttttctcattcactggacgctcttcctccttttttattattagaagttttccccaaacttctttatttttaaccttgtctttacactacaatactattgctttttgatattattttacagaaatagaaaaatggttacttaatatttttggttgaattggcatccttttttcttaaaaagaaatcctcatgtgtgtacaaataagaaaaatgaaaacagaattgttaactgccagctagtacagacactctgagctggaatcctgctctctctgttggaaagtgaggtgagctgagccttcctcttgaaaataatcagcaggccccaaaagaaggaactttctcactgtgttgttcactttttaacctttccaatgttagcctcctcgtaccctccaaaatgaccttaggtacctgtcagagccttgggaaccctggaactgctcactctgctgatgtgtccacatgtcacccagactttcccttgagctcagatttgcatttctgactgcatgctgcaaatggtactgattacatgtaagctgcttgccagtcctgcttcctatctgcttcctttttgagagtctcatttttgtgactgaattcactggtgactcatttgtccagaccaaactttttattattttagacttagctctgaacctcacttcctttcagcagatattgagcacctcctatatatcagaccatgcatggcccatgtgttcaaatctcagttcctcygtgatatttcttgggccccagacaccatatatagttcgctcgatgctcgtgtgacctcttgtccgtgtcccgggctagctgacctgccctgctctgttgttaactgacatgctgctgctccagtggatagccactcgggtgtagatgatgctgaattctttgtatcccggtgctttattgctgggcttattttacttaataagggatgagtggggcccactgggggaacttgtcatttaacagaaaagttacagtgctcaaagaaatcttattcacagttaaacaaaaagcaagactgatttttggttatcgttttgctttttaatatatttattagatgtgatagttgtataggtaatatagtgaatatattctccttaaagcagcaggtcctgagtatgtggagtacaatgtgaacattcccccttatttttccytgtgctttctcttccccatcctgatttgcaggcttagtttgtatcctgccagatcattctgtgtgcaggatagatacttttttcagcataagtgtgttcataccatgaattttttcacttaacatggcttttatatcagtatacagaatatacttagtagttacattaaactattaaaaatgtgctgcactaaacattcttgcacctgtgtgtgactagttctctggaataaatacctagaattgcttgacaaaggtcatgtgcctttaatttaatagatattgctaagttgtccctacaaggggctttactaatttatattctcagcagcactatgtgaggggggatccttctccttgtctgtattggatttatctatcaggctttgaattcttgctaacctgatgggtgagaaattatactgtgtattaaaatggagttttttttttgtttttttttttttttttttttgagattgagtctcactctgttgcctatgctggaatgcagtggtgagatctcatctcactgcaacctccgcctcctgggttcaagtgattctcctgcttcagcctcccgagtggctgggattacaggtgctcaccatcatacccagccaattattgtatttttagtagagatcgggtttcaccatgtttgccaggctggtctcaaacacctgaccttaagtaatctgcccgcttcagcctcccaaagtgttgggattacagatgtgagccatcgtgcccagcctatttttgagaatattttaattaatcttttaaaaaaactttaaatttattttacaaggtcttgctcttttgcccaggctagagtgcagttgtgcaatcatggctcactgcagcctccatctcccaggctcaagtgatcctcctgcctcagccccttgagtaactgggactataggtgcacatcaccaggcctggctaaggttttaaatttttagtagagacaaggtctcattatctttcccaggctggtctcgaagtcctgagctcgctgtgtttccctggctggtctctatcctcccgctttggcctcccaaagtgctgggattacaggactgagccacgtgcctggcctaattaatcttctgagcttctgatttgttcaaagctcctatttactggataggtattcagcctaggagtttctagtctcagattcacacagaagctctttcctaacatygctgttcctrtgcattacagttgatcttgccactrtattataaatcatttgtgtcataatgaaatgaagatgctaacttggaaaacagcagccaaatgacttcagctgttttgaagaatattccatggccatcaccccaggattttggtggctggctttcttagctggctgcctaaatgtcctttgtkgatgatactgcatttctttttctggttaatttttcttatttattatcagaactcaagaagatacgttgtcyctttttagtaaattaatacttggaaacttgaatttatgtagttggaagattattacttgatcttttgagaaatcagtctgctctaattataaaatayttaagaactacaatgaatcctatataacgaaaaggcttataaatttttttccttttaggtagtctgtagagaatgccaaatgagggaatcccccactcaagtcaaactcaggagcaagactgtttacagagtcaacctgtcagtaataatgaagaaatggcaatcaagcaagaaagtggtggtgatggggaggtggaggagtacctstcctttcgttctgtgggtgacgggctgtccacctctgctgtggggtgcgcatcagcagctccgaggagagggccagccctgctgcacatcgaccgacatcagatccaggcagtagagcctagcgcccaggcccttgagctgcagggtttgggtgtggacgtctatgaccaggacgtgctggaacagggagtgcttcagcaggtggacaatgccatccatgaggccagccgtgcctcccagctcgttgacgtggagaaggagtatcggtcggtcctrgatgacctcacgtgagtgcagcccatcttcttcctttcaaagtggtggtaaaacatgacagggatattcaggtaatggaaagctctagtattccagaagtttaggagatgtgtagaaccttttatttggaggacagagtcaataagggcagtcctcaacctcatctttgagtcccagcccttccccttaggagtggcattgtacatggtagttagagtctctgtccagctcgtgaaagccagttgcatgcataatgtccagaagagaagggctgttcaccagcatgtgcacaaagtgatctcaggagaggtgcacctaaattcaggtgtttcctattcgagatgccaggaatacattgcgcccccttcacatttttctctgtgcggtagcttctttctagcttactgtccccaaacttagtgttcagtccttgggcaatttttcagatttgcatttytagaaataataaagactccccggttttcttttcttccatccttgttctgactctggaaatggagattttatttgtgtcttagagagggagaagacttgagctgttttgagcatagcacgttaatggggaagaaggggaggctgtagacctgagcaagggtaggaggtgaggacaggagaggggaagtgggaggggttgagctcacttatcattgctgcttggcccccgttgggcagtgttctgggcagtgtcaggtaagcaagaaagaaggcgagggctgaacgggatggaggatggagcagtgtcacagaggatagctggggagggtggagtgtggcgctgtcatgaatgtggttgttggtacttcaaagacatgttttctgctaaccattccctggtgtgttcttttggcctcctcaggagcaggtgctcgttcatggttatagtctgagtgttgaggacctcaactctttgtaatgatacttttacatttgatcttggaaatgtgtcctctttctccagaggtgacagaggagagttgtggggtctccatgcagagtgatgctagatggctggtggcatgtgrtgtctcagccagtaatacgcattgtttatcctgtaatccacagaggatacaaacagcaaattacacaatcatcaagaagattgaatttgtgttttgaaaattggaagctacaattctatggtgtctattttaggagtaatttattttaaattgatttgttttctttgcaccacaaagtttagtgctgtagtaagtgaatcttccatttatgtagaagaaaaatattgtcgcagatgtgtgatttatataaaaaaatgtttaagcatatttaggatgcttccagactttggaaggcttctgtaacgggcttaaaaaacccatgtatgcattttttcatgtaaaaggacaacttattgcacattgttctagcatagtgtgttgaataaagtaggcacttaaataatgcttgtagaatgactgaagcagcttacaaatgggaacgagctgatctaaatcagctagataaaagaaaacactagcagtcatcttaaacctctaatgatcctacaagttttatttgtggccaataagggtatgtattctggtttagtttcctttatcttttagttaataagaagtaaaagggacatgtttttagcatttttctctttatattatgctataaaaatgttatcagagtgcaaaatagacaatttatcttatttttcaggtcatgtacgacatccctaaggcaaatcaataaaattattgaacagcttagccctcaagctgccaccagcagagacatcaacaggaaactagattctgtaaaacgrcagaagtataataaggtgattcagaataacattcagtattgcatttttgaaaaagtcatcatttaggggcacttaatttaggaagtattttaaaaagtgcttataagatgtgaagcaaatacttataattacaatagagaaattttgggtttcttttgtatgtttaatctttctgctgttttcctttaacatcccattctattgcatttaaaaaaacacacatacatagacacacacatccatacgtatacagttgctccttgatttacaacagggttacatcccgacaaacccatcgtaaattgaaaatattgttagtcaaaaatgcattaaatacactgaaaaacctatcttaaagtcaaaatattgtaagtcaaaccatagttaagtccagaggctcctcagtttataatggggttatgccctgataaacccatcacaaagttgaaaaattgcaagtcagaccatgataagttggagaccatctgtgtatttgagaaaagttcctttttggtgttgcttgcctcacttgggcgcacttccttagttttcctgcatcaccatttctttggcctggcttagggtcacactggcctcagtctcctggtctcctgtgaactcttttctgcttagcccttgcttcctctaattgtctccactctgtttcttggtggtgcagccattgaccctcacacacctttgctgacagttgcgagagcttggcccttcctcccaccttgggtgttacagtcagcacccagccacactggggttgtacttagctttggaaaacttaagggtagggaatatttgttacttaggatattatttttatgaagtttgaaactttttttaaggatttatgtacagctttgtgaggtctgaaacattttttatgatttatgtacccctttgtgaaaatacattgcaatagataggaatgactagctgtaaccatttcagttctgccatcccaacttgtgcttacagttgattcactgcagtgagtagagtccttgcatcttttctttaagctctccaggggcagggctgtgcgttggttcagttcacgtggccctccttttattatactttccactcaccagtctgttacctgcactaccccatcttctctcacttgcttccagaatagcagcccaaaggtcaaagctagcagttgcccaaggcaggtgggtcctcccaaatcagagagaggacatctggtctcttgtgggagcatgtgaaattgatgtgcagagaccttcttgggcttctagtgggctggaatttcaagggtgtagagcatcaaacttgagaccacttcaggtcctagtctaacttaattatgcattcttgtctttagcagctctttgatggttagaggtagactattcagagggaaagtgctttagacagaatgttgctgagagaaaaactgagaaaaaacaaattgcaagtcattgcagtgtggcatttatgttcaggatttccccttgtcccacactcgtatttgaagttgaaacattcttgaccttggaaagatgaaccaggtaccacaagcccagttcattgggcctccccagtgaagcccaagggcacatatctgagttctggtgatgtggaagggaacaagacaaagaggagtctggcgtggccagggtggagaggcatggcaagatatatttttttcttaaagctttttgattaggtagaatactaaaaggacagtcataaatatagtaggttatcaaaggagactaactttttcaattgaacatttgtgtttttatttcttatcttayggcctgttgacttccatagcccattggttctgaatcagaaatacagagtagtttagggatttgcccagtgtgtaagggggaaaccaagtagaacaagtccacctttcaggtcagtgcccatgtatttaagggctcgggcacatagaaggcagtctgccgtcctcaggagagcatgggggtgcaggcatgcctgtctgctgggaatattcacggcccctttactcctagaaaagtggtagttgctcacatagggctctctagtaatagtaatgtatggaatttttatgtaatgtatattatttttattttactttggatttaagtttaaaatttcataatgctatcttttgtatttaacaataaatcacttcattgctgttttctgtcttctatatttaccattcaaggaacaayagctaaaaaagatcactgcaaaacaaaagcatctccaggccatccttggaggagcagaggtgaaaattgaactagatcacgccagtctggaggaggatgcaggtgaggatgctaggagcagtttctctgtgttcttgaattgatgcctgatgcctgtagtcagtggagggtgtctctttagtctttgcctgggttttgagaaaaatacgtttctttgccttagtgtcaaaacagatwtaggaaaattttattctctacacctgcagaaccaaatccctctcaaagagaattaaagtaaacttttaactcagttcataggaggctgctggtacacatttattattacatttaatacactggaaatcttaaacattcttattttgttaatttgataaagacaactagcatcatgattaaattacatgttggaagcccaacatcattaatcgcatttgtagaatggctctcacgtgtctttaaagagcgtatttggcaggctttccaagcatcagtttaagaaaagacatcttcattcaggtactctgggcagtatttcatttacattactgtcttggatggttgtcttttggaaaactttttgggaaaattcgtaagctctggaactaaattatctttgcagtcattgygtgtgtgtatgtgtgtgtgtgtgtacaaattgttggtggctgcataggcattgactatttgaaatacagattaaagctgcttagcattaaattctctaagcaactattttctactagctttagaagtttattcagtaagatgagaattgttatgaagaattaattgaagcaatagaaaaaaatatgtatatttttgaaacagagtttcgttcttgttgcccaagtttggagtgcaatggcaccatctcagctcactgcaacctctgcctcccgggttcaagckattctcctgcctcagcytcccaagtagctggattacaggcgcataccaccatgcccagctaattttttgtatttttagtagaaacagggtttcaccatgttagccaagctggtctcgaactcctgacgtcaggtgatctgctcaccttggcctcccaaagtactgggattacaggtgtgagccactgcacccagcccaaaagtacgtggttttaaagttcagcctctcagaattcattaggcctatgaccagtgcttttaactgctgtgtactatgtttctcattgataacagatgtttgttcctgtctggccgtctcagatctgctgttgtctttcacctcctactgtgactttggtagtagggttaatagctacctcttagggttaatagctaaaactttggtagtagggttaatagctacattgtctagggttaatagctacctcctcaaatccaagagcccctttttatccttgttccactctgcctgtccacagcagctgacacttctgttccttgtgggatccctgcttctctactggttttctttttagccctctgactacttctgcatagttatttctggccatatcttaaatattgatgtttctcaggatttctttgagccctcttcttgttctactgcctctccctggttatctattccccatggcttttgcagccacctaggttctactagtaccttatacagatctgtagacatctggctttgctctttttttgagttcctggttcctattatatctctctgtctggacaccagccaacacttgaagacatgaactgaaattggaagttacaccataactgtaaagtcacccagaaagtatccctctttcattagttgaaattcatctccggcaaaattaccacataaccaaaataccaaaagacctaaggcttaataggaagcaaaatactcagtgtaaagacctaaggcttaattgaggcaaaatactcagtgtaaaggaaaagatttgttaaatggactatatataaaaccaagaacttctgttcatcagaagatagcatttagggcaagatactgagctggggaagatatttgcaatacatgtgtgaatcaaaggactcaaatctaggatgtataaagaactagaaatcatttaaagaaacagacaaacaaaaatgggcgaaagactggaacacttcctacacaaaaaaggctgtccaaaagataaattcatgaaaggcacctattttgttagtcatcagggaaatgtaaattatagccataatgtggtaccactacacatctaccaaaatagctaacatggaatggcaagaatatacaccagttggaactttctgacacagttgatggggactttggaacgtaacactttggaaaactgacagtgtctactaaagcttagcatacccagatatatatatatatatataaatatataaatatataaatatataaatataaataraaccaaaagatgtgcatcagaatattcatagcaacattattcctagtagccaaaacctggaagccactcaaatgtgcattaacagtgagagttaacaaactacagctacattcaacagtaaggatgcagctcaaaagcataatgttgcgtgaaggaaggtggacacagggcacaaacatttccacttacgtagcgttcagagacaggcacaacttgtctgtacrttaggagtccaggtccatcattatcttggggggcgtagaggctgggaggtagcctgaagggctcatctggtggtgctagtaattctgttagttgatatggctgctagtttatgagtacattttttctgaatattcactgagttctacacttaatgatttgtgcactttcagatgtatgttttatttcagtgcaagtttaatgaaaaactgggtatcattggcctgcaagaattgtagattttagaatatggattccttcctattaagccttaggtcttttggtattttggttatgtggtaattttgccagagatgaatttcaactaatgaaagagggatactttctggtgactttacacttatggtgtaatgtcttcaagtcagttaacttcacatatctaacacagtgctgctgtccaatagacctttttgcagtgatgaaaatgttctctgtgttgcccattatagtagccattagtcacgtgtagctcttgagcacttgaaaaagggcaaatgcaactgtggaactgagtttttaacttaatgtaatttaaatttaaatagctgcaggtgacyggtaactgccatgctgggcagcatagagctgacatttatgtttttcctttttaggtacatggtgatccctgtttttggttttactgtctcttgaatttaagtccatctgaatgttggttttagcaatgacgtgagaacttcggagcttgcttcctcatggacgactactcagctgataaggaaacacagctaaacttgactatttataactgtatttatacagtaataagcctatctttggatggcagagaktatatttatagtgaaatattttggggaaaagttactgagaagttgtctttttgaacaggaatatattaaatatagcatgatgctataattttattctgtccttcatatgtaacatgctttagtacatggatgattctttttttatatgagttatttgtagctgcctaatatttcttgaaagagtgagcatttcttttgtaccctcggaaagtttcatgctagtgcgaaacgcattgctattgttctttcagagccggggccatccagtcttggcagcatgctcatgcctgtccaggagactgcctgggaagagctcatccgcactggccagatgacaccttttggtacccagatccctcagaaacaggagaaaaagcccagaaaaatcatgcttaatgaagcatcaggcttcgaaaagtatttggcagatcaagcaaaactgtcttttgaaaggaagaagcaaggttgtaataaaagagcagctagaaaagctccagccccagtcacgcctccagccccagtgcaaaataaaaacaaaccaaacaagaaagccagagttctgtccaaaaaagaggagcgtttgaaaaagcacatcaagaaactccagwagagggctttgcagttccaggggaaagtgggattgccaaaggcaaggagaccttgggagtcagacatgaggccagaggcagagggagactctgagggtgaagagtctgagtatttccccacagaggaggaggaagargaggaagatgacgaggtggagggggcagaggcggacctgtctggagatgrtactgactatgagctgaagcctctgcccaagggcgggaaacggcagaagaaagtgccagtgcaggagattgatgatgactttttcccaagttctggggaagaagctgaagctgcttctgtaggagaaggaggaggaggaggtcggaaagtgggaagatacygagatgatggagatgaagattattataagcagcggttaaggtcggtctgtggggattataaatacattgtactgtttgctttatcttaggtgacaggtttattaatatgtaagcattctagatccagcttaatatattagacccccccgattatacagaggttggatttctgcagccttaacctgctagaagcagtggggcccctgagtccttaatgatgctggccccaaatgcatgtacttctaggtctttagttggatttggaggcaagtctaagatgaaaaacttaagggaaggctggggcaagaggcatacagagggctgagtgtgagctgtgtcgcctttataccgacagtcaccctagaatgagtatcaggaaaaagaaaagggtgaattaatgcatactggataggggtttctgttttcccttttgaagcaggaaagtaattttagagaacttttcttcaaaaaagagctgaaacttaagctttggcatagaaagaataagcttgcttttgtaaatccttcctttgtcttgagaaaatagtcatctgcataattataagccaccatcatgcaaaaagtgtactttgtatgcacagcatacctttcttttcactgttgttttttatgttagagactgactttggcttttagctccatgacattgtcattgtataaagcaagcaccataaaagggaaggtgaacatgtgaaacatgaagtctgaattgcatattgccacacgttttctgagagccaggaaaaataatctgtattgcaggcctccccatggtggcccactgaacactgtgctactgccgcgcatttcaagtctccttgacttagagctcacttagctctaaggaagtcaaagggaaaaaggaaccttattacttttaaaatacttgatagtgggatggctttttcccaatcctcaacagttttttcttatttctcaaggtgaagagacctagtttgttgtatttattggcctttgtgagtgaaggttgacctggtgttttttcttgttacttagaactgctcattaacccccgtccagacactacagacattccataacctttccaaaatagatgtgtcaattcttttaaacagtaatttgaggacctgtgacttaaatcctgttctttagagttgcggcactcacattctagtagcaccttatgtagtaatgcacagatgagggctggcttatatttgtcatccctcagcacagctttcgtttctgtgcacgtttattacctgtgaagttgtttgaggaatgttgcccagtactcttgaacagtgagcggtgtcagactttttcttaactactgcaaggaattaataaaagtgttaatctcaacatattgattataaatggagcaatatatatttttccaattaaattgggtcaatattaaatatgtttaaaatatatcagtattttgatcaagagcaatttattttgattgaattttaaatgtgggtttagttaatttgatggcaataagtttttcttaataatgttaagattgtaaaacaatttattatttccagagccaatattttgctaaagctacagtgaaatctcaaatgaatttcagaaatatcaataactcttaattgccaccaaaatacgatagctcttaacattttatagctacagttattaaggctgttaaactgcagatatccacattgaaatatttgttattacatctcctttggtgctgtttggtttgggggatgaaagaaaataaaatgctcaggattgagaagcatattagaactgccagtctctctatattttgttactcattgctgatctttgtagactaattgaaatggtaatgctattcccttgagaaacagaaagacctttagggttgcttgtcttagcagtggtttgacgatggatgattagaataaagtcatagagtttacaacatagaaaattagtttttttttagtggttagaatttaggagtagttcccagggtaggcaccctttgctgaacttaacaccttttactgagggtatagcctgttaattataatgctcttttcaactctaggaagtgagagtgggtgacttctggatatctcatcctctttattctctcagcttgagagccatcggcctttcactggcactaggttcaccctaactaggtgcctttgttttagctgatacttactaggaattttccgtcaagccctttccatagcttttttaatggaactgggcagtcgccctttggatcctgctttccttcatttggctcaagccctcagctcagtctttgaagttttaaccatttttcaaaccgtgtattcccccttctcatgtgtttctcctgcctcctcctctgcactgaactgtatctggaggctgactcctcagtgggttccctggttttcataccctttcatgtcatacaggatggatgagccactgcttagaagtaaatgttctgtcggttctatggtcagtggtatacaggtcttgtaaaacatacattattttttcattttactttgtgctaccacggtttccatttgcttatggctgttggttgtgaggtctagtgctttcttaaaatatactactgctttgcacattgtgggcctgggagctccgggtgccaaataaagattaggactaacacaccttcagtgtttgagtgatgtgggttcccrgtgagcacctacatgctgcttacctagtacaggctgtgcagccaagacagccctgtgtggcccagaagaccaaacatttcatgtgaacctttccccttcagggtgataaagatcaggtcgcttgtccccagtccttgttacctccatgttattgattcacttcccagttgccatattcgaggtaagcctccatagctttatctttgctttcatgtcaacaatgcatgtctgcatccttggactggcttcaagggtttctggcaaaaaatttgcagtctgttaatagacttgggcacaaataggacctaaccaagtgtgaagggaataatgaattcagactgaggcatttgggagagactgttggggaagttcatccagtgcagggccttgtcttgttgggtggctcagatatattaatatgacccttatccaaattaacaatgttacgcatttgcccctaaactccaggtgcatcattgagaagggaaggaatttgctttgctttggaggcacattatttcctcagggttctcatttggattgccttggaggttggtgtgatgccacaatgtgcagagaggctgaggacagggagggcaggtgggcttcactttccagccagctctgatttctggggagtggtagtctattcagggggctccgaggccctgtttgggtggattgggaagagtgtgcagttccttagtgatgtctatcataggcacagtggggaactagcaacattcatgctaggtatttgccagccttgacataataaaacagatgtcactgactcctgcctctttgtccagcagtggtcagcactgcttggtcaggctgcagggcatagatgggttgcatcctgagtgagaaaatgcatttccagatatgtttttgtctcttcttgctggcaggactagggttagtgtttatcatttgacttaaactcattcccccaagttcttactctattttcatgtatcggcagttactrtttaagttgctgccctcgcagactacagtgagggcaacgagcacagackagagcaaagcttccccacccacagactgattatgcagtgtcactgggagcccctaacactggagacgctgacttaggaagtgtagcgtggggtcaccgggcaggacttttaaaaaatgttcccagatggctctgatcactgtcaggtttgggagctagggatggaaataagtcagtcttatgtatttctcttttttggggctgcagcttttggctgatgcagtttgtatatcagtttctcaaaaatcctcttttatgtgccctgcacagttgtatgtacacaggggagggcctggcagggagccttagctaaatgctgtatgtcatagatcatctggttcttgtggggtgtgtgtgtcagaatcacatgggaaacaccttcagagggtaggggcctgggctcagcgtggggagtctgaggcagcaggtgcagagtgggaggagctgggcactgcacttgtgctttggctgagctcccgctgactctgaggggagcttggtgacattcttcatggtccacaggaccttgctcagaaagaactatgttctcatttaggagagctttgaggcagttgggaagcattrttggtaaggatgttgaggcttgagaatgtaatgcttttttctttactatggcccacactcagcaaataattgcctctgggataaatccccgacccatgcccaccccgatcagggaaacatagtggggagttcagaaacggactcttcagtaggcggtgcctgagtctcctcagatgacctggtgcattgggctaagctgctaaatgcatagcctgaagtggatttgagttggttcctctgcatgrtttgaaggctccctcgccacctttcagcacttctgatgagtccctatttttattgtaaaagtatgacaacaatattaagatgaaaaaatgacctcttttatgtttttattttctacatgtcattccagtctttggttctgtgaatacacatctttacatggttataatcacggcccctccagttarttggcttgcccacagttttactgtgaagtagagctgagatttgaagtcggctgggccctytacatacatgtttccttccctttgtgggattgagtagaaggtgcaatatttaggtatgaccacagggtggtgccaaaaatcaacacatagctgcccccacctccattggactgaaaaccaaaccaaaaacctaagcctgtaatctgggaatttggatgaggatatagggagatggctcaggagtctagaagacctggcaagtatggtgtggatggggacagaatttacttcatggtctggtgtaacctgaatctgtagacttgatgcctgttgatataattggtttttaataaatttttgatcctaaaggtttttcttgtgccctattttttaccttttttacatgagtaactctgagatgtaaaggggtgataaagattccattcattgtgtaagtcttacagaatgtcttctaatagtctgtgagacataatctcctgcgaagataatactcttcattgtccttcccctgagcactgggcctctgtggccagggccccattgaaccctggcttgggagggttgggttgtgcacatccactgttctgaggagggagctgtcagcatttcagatgctaggggtcaagccaagtagaatgactgttatgaagagagtcttgtggatttggaacgttgcagcctttagggcctgagcaaaggtggcatcaagtggaggtgggggcaggggcgggagtggtgcacaagaacaatgatggctgacatgtttgaatgcgtacgacttagtggttcttgtggttcttcttgttatataggttaattcgtttaatccttacagccacccaggagataggactttgagcccagagagatgaagtcatttgctcaaggcagcagtcagtggaagggcttggagaaggagaaggggtctgaaggtggtgtgggacacatgagagtgatctcgcagcttggtttgctgcagcagactcggacaagcattgtttcagtgcctggtttctccctccacttgatgggggccaactccaacccaatgtcccattcctatcctgaaatgcttctaaaggcagtgccctgagaaccaccaacctcacagcctgtctccattttattgtcttctgggaacttctcccttctgtctagcacctgtttgcactgggattgtcctgtctgtccttcagttggatcctggtttgcacccgatgaggatttagcaattttaggctgtgcttcggcaaaggccaactcacaatgtggaggttgatttgattgtgccttttttttaaagcccaaattaaagagaaaaaacaaaactctcccaaaatctgaatttagtaaaagtttgagattttatccagaaacctaaatacaattattttaagaatgttcttaacatctctgagagttcatttttctcaagaaataagcctggccgggcacaatggctcatacctgtaatcccagcactttaggaggccaaggcaggaggattgcttgagctcaagagttcragaccagcctgggcaacatggtgaaaccccaaaaatagaaaaagttagctgggtgtggtgatgtgcgcctgtagtcccagctacccaggaggctgaggtgggtggatcactggagcctgagagaaaaaaaaaaaagaaagaagactgtgttcattttcttttaggaatctataagttgaaagaaaaagttacacttttaaaacctatttatgcctagtgttccattattggaacgctaagcatgtgggagttattcatgccctactgctcaaggtcattgccaaggtctgatttttcacacatgtctgcctcctgagggtacatgttatcacttggtgcacagagttagttactgctacagatactggcatgctgggagcttgtcaaaaagtgatgtgagttttcagaaacatttttgagtatccaaagacaggtacatataactttactgcactacatcctatacwagtaatttttaagaaataacttctctactagttatgctattgtgcggtaaaaagaaaatacagaaagtattattattgcattagttatgggtttgacatttttcatgttccatttttggaacactaggcaaaaccactaccactaggactaataataccttttttccgttttagtcccaagatgcctcgaacactaagtttacatgaaataactgaccttttagagacagatgacagcatagaagcaagtgctatagtgatacaaccacctgaaaatgctacagcacctgtttctgatgaggaatcaggagatgaagaaggtggaacaataaataatctgccaggttctttgttgcacacagctgcgtatcttattcaagatggctctgatgctgagtctgactcagatgatccctcatacgcacctaaagatgactctcctgatgaagttccatctacgtttactgtgcagcaacctccaccatcaaggaggaggaaaatgacaaaaattctttgcaaatggaaaaaagccgacctaactgtacaacccgtagcaggtagagttacagcaccaccaaacgatttcttcaccgtaatgagaactcccacagaaattcttgaactttttcttgatgacgaggtcattgaactcattgtcaagtactccaacttatatgcttgcagtaaaggtgtacatcttggcttgactagctctgaattcaaatgttttctgggaattatttttctgagtggttatgtctcagttcctagaaggcgtatgttttgggaacaaagaacagatgtgcataatgtactggttagtgctgccatgagacgtgaccggtttgaaactatattttctaatttgcatgttgctgacaatgcaaatttggatccagtggacaaattttccaaattgcgacctctcataagcaaacttaatgagagatgcatgaaatttgttccaaatgaaacatatttcagctttgatgaattcatggttccttattttggtcgtcacgggtgcaaacaatttattcggggaaagcccattcggtttggctataagttttggtgtggtgccacctgtctgggctacatttgctggtttcagccgtatcagggtaaaaacccaaatactaaacatgaggaatatggtgtcggtgcgtcacttgtccttcagtttagtgaggcacttacagaggcacaccctggacaataccattttgtattcaataactttttcaccagtattgcacttcttgataagctcagttcaatgggacatcaggcaacaggtacagtgagaaaggatcacattgacaaagttccactggaatcagatgtagctttaaagaaaaaagaaagaggcacatttgattatcgaattgatggcaaaggcaatattgtctgcagatggaatgataacagtgttgtcactgttgcctcatctggtgctggtatccatcccctgtgtcttgtcagtcgttactcccagaaactgaaaaagaagatacaagttcagcagccaaacatgatcaaagtgtataaccagttcatgggaggcgtagacagagctgatgaaaacattgataagtatcgggcatcaatccgtggaaagaaatggtattcaagccctcttttgttctgtttcgaattggtcttacaaaatgcttggcaattgcataaaacatatgatgagaaaccagtggattttctggagtttcgtcgacgtgtggtatgccattatctggagacccatggtcatcctccagaacctggccaaaaaggaagacctcagaagcgtaacattgactcacgttatgatggcataaatcatgtgatagtcaaacagggaaagcaaacgcgatgcgctgaatgtcataagaacacaacttttcgatgtgaaaaatgtgatgttgccttacatgtgaagtgttccgttgaatatcacactgaatagcaggtgtcaccacctcctgagataagaaacatagttttatacattatgtacagtgtagcagtggttttgcctagtgttccaattttggaacgtcacataacaatggaacataataaatttttttttctcttcaaatttttgttccttgaatttttctaggtaacatatatgaatttcatgcaaaaattcaaaaaattgtaacctcagacataaatgggttaaagatgttttcttagagagcacattgccttcttttaaataacaaagctgagacacaaatgaagactaattctgcttcctgctctgcacacacctttcattcttggctctgggcataattgtctatatcagtcttaatttactccatgagatctgcactcctaactgagggtatttcatctgctcagatgtgccaattaagtttacccagatagaccataaaaaggaagataagaaaagtaaaacaccaagtatctcaatttagcaaattagactaatctgtaagggattcttagctgtctgaaatagaaaacctatcatactacagaatgcaaactatattaaatacccagcttggtgcctgaatatatttttaaaaatcaaattgtactcattgtgcctctgttgttgaatttcttaaatggatattgcaataggtagagaatgatcttgaggttgaaatgtcactctgtattaagaatgatttaactgtatgatacacagctttttccttacagacggtgtagatttaaactgctctgtgtacaatgatccttgcaacataaaaatattacaatagagcagtaaggtctgttttgaattttgagcaccacggtaggtgacctccttgaagttttggagagggcatgtttattttattaatatgatctcaggcaactaatatttgataattcccattaatatgtgtattttgtcccttttgtgtgttggtatgggcagttgtgtacattgatttgtctagtataaaatgtgtattacatgattgttcagcctatattatgtatagttcaaagaactgctaaactgattttactgttacttggaaaagtttgcaggggtgtagtgaagagtgagttttgacttactttgcacactattaaggtggggaaggaatcatgttattgtacaaaaatgaaggcaatctttcccttctttaaaccttagtcctgatgttyttttaagacaacatttggattgaagttttagaatttggtttgttcttgtgcaattgctttcgttctgtggcagttagaggacccttcgctggcactgtgagaaaaggggtggtactagggagtttggaaaatacttttttgaagacagtattatgtaacagataggaatatagactctggaacttgattatctgggtttgaatcttttcccttaactcattggtaatcttggacagcttcctttctttctccctgtctgctttaattgttaaaaaaaaaagagagagagagagaataacaatagtattgatatggtttggctttctgtccccacccaaatctcatcttgaattgtagtccccatatgtcaagggaggaacctgatgggaagtgattggattatgggggcggtttcccccatgctgttctcacgatagttagttttcatgagagcttatggttttaaaagtggaagtttttcctgtgcttgcactcacttcctcctgccgccttgtgaagaaggtgcccttcaccttccaccatgattataagtttcctgaggcctcccagccgtgccgaattgtgagtcaattaaacctctttccttataaattacccagtctcgggtatttctttatagcagtgaaaatggactcatacaatatagtatctcccttattaggttgtaaagattaaatgaattaataaatgtgaaatacttaaaatagtgcccagtacccagtatcactgtcagtcataattactatttgttttctgacccaattaagaaatatgtatgtatgtgtgtatatgtaatctcaaaacaaaacttgtccagagctagctgactttccttaaggaggcagtatatagcataggggttagacaccacgggccatggagtgagtgccagagcctagccgagtagctctgaggtcttgtgtatccactcacctgtaagatggggatcacagcagtaccttcttcatgggtgatgatatgtataagatatttggcatacatcaggcactccgtaagtattagctattcttgttacatgcccactagctaaaagttaccacaaagattccaccaaggcagtaagatgcttgaaatgagggtctgtgagaaccgtgaaggagggtgtataatgaatactcatacgtatgaaaaggtgacctttcacaagtaaaggcagtttaacaattgatattacaggttgaccatccctagtccgaaaatccaaaatctgaaaattttttagcaacgtgatgccacaagtggaaaattccatatttgacctcatatgttgggtctcagtcaagacacagtcaaaacttcgtttcatgcacaaaatattgtataaaattaccttcagcctatgtgtataagttatatatgaaacataaatgaattcgtatttagtcttgggtcccatcccaacatatctcattgtgtatatgcaaatattccaaaatccaaaacacttcttgtcccaagcattttggataagggctgttcaacgtatcataggcatagtaaaatcattagctgttacaaactttgttttattgatgttatgcttttggtacctttcatacttttttaaaataagcttaaggcccacttaatgataaaatatctataaaaatataagtacagtatcaatattgggaagaaatgtaattatttctcctttgaacacactagggggcactagacatctgtctaggggacaaaccgtgcaacatgccccttggttctaagtgtaggtaggtcaggattgcagtatggtttctcacagttgtattctgaggtagatgtaccagatccttctcttgtatctcttttgtgtcttctcttttggcttgatttccagcctccttgctgtcctggatgataggatgtcctgactggaatgtcctgctgatcttgactgaccagtatggagtgagctagcatgacagtctgctatgcttgggggttgaactgagctcctgctggctcaagactgcaataggtgttttgacatttgttattttttattcacatttaacctgcaattaattaaaatttctcaatctttttgtgtaatctgccaactgttatagcatctgaaatttatgtagtttcaaaagtataatgtacatacgtaatttcatttagtcctcataaaaagtcattatttggctcattttgtggtggaggaggcagattcaacaatgttacattatattttctaaagttcaggcctccccttaccagttaaatgcctgtaatgcacctcttttgcctacattcggttttcacttctctgtggttatcttaaatctgtgtctgttgttgggttctcttctagtgaccaccactggagcctgagacgggctttaggagttagaaaatgccctgatgggtcgggaatggtggctcacgcctgcaatcctagcactttggaaggcaaggcaggcagatcacttgaggtcagtagtctgagaccagcttggccaatatggcaaaaccccatctacaccaaaaaatacaaaacttagccggacatggtggcgcatgcctgtagtcctagctattctggaggctgaggcacaaggattgcttgaatctggaaagtggaggttgcagtgagctgagatcgtgccactgtactccagctgacgtgacagagtgcgactttgtctcaaaaaaaaaaaaaagtaaaaaagaagatgaacaacacacttactttatttgggtgcagctgtgacttttacatgtatagattaaagaaaaaaatgaaagtgggaacatcaaaaacactatttccttcctagtaatgtaaatatagtttaagtctagacttttttcccatcataagaattctttcataagaaggtgcttcttttgtccagcctttcccacctggtcctggggaagcttgggagcaaactcagggctcctggttctttccatcagctggcgtgcagaaaccaggctccttacagaggagacctactggtgatgaacccaaaaaatggagctcagacttaaatcactcacacaatttttatttatttacctttttattgttcaaaatgatgagctttccttctccttatctttttttttttttgttataagattctaaattaagaacttctctgatgttgcagccaccctcattatgggtcatttttttgtagcgaaccttaaccatttttatccagtggacagagctaggagcagtgctttaaagtcatatgggtagaaggagtaggaaatgcagcaagaggtaggctctaaatgagacagaacagaaagtttccagaacccatttctggatgaccccatttgaccattttcaagtcacgcttctctgtctgtgtcttccttttccctaaccgaattatgaacttcattcattcattcagcacttaacggtctgccatgaggaggcattataccagtctctagtgctataaaaatggctaagacagtgtttgtccccaggtggcttccagtccagtggaggacactggtatggatttcacaatatgctacacttgatgggcactgtagtagagatcccaggtgtgtccaagatgtcacgggattgggagggcccttggaagacaggacacctaagtctggctggtcatgggaggtttctgtgcatggtggtgctgcatgagtgagggtttgaaaggtctgctgaatgtgtggatatgtaaggggaaggatttggggacagtacaggaatgcaggtgcacagagatgaggaggctgcatacatggtatggcacggtggtagctagctgtgtctttccacttatttattttgaacatccttggaatgctgaaaattcttctaaaataaattaactttaaatggcagcaactagctttcagggttccattgatgcggcaccctaataggttacaactgggggaagcattgttcctggtgtcgttcaactggttgtgctgggtctgagttgcttctgacagatgattattgcagtctcagccccaggccccacagcctgggccagattctcattcctacctgaatgtagggaaaccagggagtgttttctctgtctgcatctgactggaattgtaggtttatgtttgttcccagcttctcttgtaattggctgccagtggagttgacagcaggctgaatctggcagttgtgtgaggagctagaaacacagccagtgaacaccatgcccaccacttcgttttatgtggctgcagctgtgactattacgtgtgtggattttttaaaatgagagaatagagaacatgaaaaagttatttgttttctaaaagggtaaatattggactatttactgcccccttctgctttttctcagttaactggtctactttttgaaataacagaatttagacattttgaggtcatttctaatttttaagatttcagctcacttggcccagattttaattcttacccactccctaccaattttaagtcaatctgtatctatttttgttactatcatgtaaaagactgccatacttaatgacagtttactatttacaaatttgtgacagaatttttaaattgagatattccagcaggtaccatctgaagactaggtatctttactcctatggtgagcacattattcataataattaactgagcatccatttgatgagctatcatagtttctgtttaagtatacatgttcaggtagttctgttaaacagagtacgttgcaatatgcacattgcattgggccacatacgtaacttgctttctcttctttcagtgaacatagtaatagtatctgctgcagggttgtcgtgaggatttcagaaaatgtatgtggttttatataatactatagtagtttattaagcacttcctaatctaggttctgtgctaaggtgctttatatgtgacaccttatttaatccttcccagaacccagtgaagtaggtgctgctgttctccccatctcagtggaggaaacttagatgctgatgaagttaagttacttgctgagggttcatgagctagtaaatggcaccaggatttgactatagctagtctgagctcagacttttgtgcctgggcctgcacttctgcatatgtcaaacccaggatgtttatatacagaatcctttatatctgctggccagacagactactcagcctgccagactacagtacaggctggttagacatgttaaagagagcccttaaagtctcttggcagcgtctgggatgaggaaggcacgtttctgtgtatgtgcagatgaacctggttctccccctttccctagtgtgttgtggtgtacttgtcggccccatctttagctgtgctgcttcagtggaccctcatcagatggtcaggtctattttggctacaagtcacatgaggaagtattgcttatgtaacagaagaatctcttcgcctgagctctgtatgcatgtggttttataaccatgatattttctgtctttaatatgtgtataattctactggggcaatttgtcttcacaatgatacaaatacttgcaggcaataatgattttccccaccacttttagtcatcctttagccaaactgaataaatgtttggcccttttcatctttctttatgaagcggaaggcactagaatgcaatcgtttctgtagtggcttatgtggtttcctaggtgctgagttctgtggcgacaagatgcctgtatattttaggagggagggaggaggaggaaactgaatcttgtcgatgcagagtgatgtggtgggaaatttagcagccacaaagattgactggctaagtctaaggaaatggtcatcatatatcaatgaagtttaaaaagtgataccctgtatataaaatatttaatggccttgtgccaaacttcaaaaggcaatatattctggtgtttttatttctccttctgtaaaattatcttggagaaattgcaaagtgaagtatgtttaagtggctgtgattcttccaaggtttatgttatccacaagtttgctaaatacaagtatcctttgttatgcagaagtttggctctgcgttcatagttttgataccgaggactctctcattatgtaaactcctcgactgctgaatttcagagtgagtagcaagaattcagatatgtgtatcaggaaagtgtatatatatctgttcagtttctaagttttgatagtaagggatacctatatgccagggcttcttggctttgacattattgacatttgagacttgataactttttaccgaggggtttgggggctgtcctgtgtggtgtaggatgtttagcagcatacctggactcacctgcaagatgccagtagtagtatatcctcccgactccttccacagttctaacaaccaagaatatctctgggcattgtcagattaccccagggtggggttgaagggacagaattgccccctgtcaagaacgattgttgtacaccattgcatttaactaaatttgtaaataacatgaaacccagaagacttttatagccacctagagataattcattttgtccattgcatggagataatttttaaggaaaaaaaataccagtggagaagaagagattgcctttagaagttaagcacaaaaaggacattaaatttttttataaaaagtatcacttattaaactgttgttagatgatagctatttccttagacttggccatatactgcctcttccatttgctgttcttctctggaaatgaccaacagtgcttcattgatcttatttataggtcctttactaccgtgtagtgcaatttcagataaccagttcttgttgatcacaagtaaatttcagctagcccttccttttgttaccttgaagagttgaaattttcaacaaggcaagagtttatcagaggatgtgctttaaggtccaccagtagctacctacatactagcaytgggctctgtgtggttttgtaatggatactggacaacacaccatacctttggccaggcagcatgtgtagtattaccctttcattttctcttgccttccctcggacattctctcttactcttgcatagtcagtggcagataaatgccttatatgtgttgctgctcttactcgcttcctatgagttttttttttattgtagtttgaaagcatttctctgtattattgttttattccatttccaccattttgtgaaattcagagcatcagttgcaccatgctgaatgaaaacatcatctttttattttgaaagtgaatagaatttgaggctttttttttttccccactcacgacaactagagtccattatagttatgtaaatgcaaaattagtctggttaaatgggtgcaccttctccacaaccttggtgtattgctaagactttcagatatttagatgaaatatatttccttctgaaatataagtgttcaccttattttatatctgaaagtatcatattactaaatttgtaacttagattttattcagtgaacacatttttttgagtggtagcactatcagtgcttgtatattgctgatgcctcttcccccagttaagtaatcagtaatgtgaacctgattcagtgattttgaccccaaatttgctttatgtttaaggggctttgttgttttatgctgtgactatcatatctttagaacagaaatagtaattataaatctattttttgttacatagtattgcggttgtgaagacactcaattatattgaaatttttactgaatcttttctaggactaatttcatgtcttacgaaccagcagagaaattttcccttagggtatgccagaagaggagcaagtagttttgataatgaaatgagaccttaaagaaatatttctagagcagctataataatttacataagaaatgaattgagatggctggagaagagaattgtttttcctctttgaatatcagtgttttgggtaataatggcagcattaacctaagagaccgttctaatttgcctgttttttcttgtacattatcaggagctatctttttaaatctgtcttgtgatcaaaataatggaaatgtgatttttattttcatggtaggagatggaataaactgagactgcaggacaaagagaaacgtctgaagctggaggacgattctgaggaaagtgatgctgaatttgacgaaggttttaaagtgccaggttttctgttcaaaaagctttttaagtatgtaccatatgttctttcctttctatttgctatcaagccattatgtacaaattaacattttaggaattacatagtagttacctgtgggccctgaaggtacttgcagcaatttgttgcaaaaacagatactgtcaaatgaaattatagccacgtgctgttcattaaaattggatgataataagttgactaaaatgtgcattgggtatgtttgtaaactgatgaatctatatggacctgcctcagcagactaaaagcaacacatttaaaagccatttatgttgaataatttttttgttcttagtaattttaaggtgccaaactcctaatttcttaaataagattaataggaagagttgcatattaaaatcaatattgggaaggattttttttcttctatgtggaaataaaaaacttttgacattttttttgagtgtcttatattgtacctgagggtataatatttttgagctgaccaaatgtgcatctaaatattttatgtaggatgtcattctaatgtcaaaagagaagatatgggcaacaccttgatgattaagttgctatttgaagccaggtttcatgtgtaagtggccaagcattggagatgaccggatgctgcctgatagatgtgttcatgttgtctctaagggctggccagtctcccgtgatgaatgtaaatactgaggaacattttcagtctcgtcactcctgggatttacttaacaagatactttaggaaggcttcttagatgcatataggaagttaaaccattacatagcttctttctgtctcttttgtataatcaatttgtagttgggagcaggatgcaaagttctttgttcgagatgattaagtttggtctcctttatagattcagctgtcagccatgccctaaacttgtggaagaagtctacttaaaaacagcatgctctttatattttctctcaaagagcttatattatagttttaatttttctctccattggggtaggggagagtgaagagtagtttttttatcccactaaacattatagaaagccaaactctaaagatgtgaagtgacttgatgtgattgctttaactggacagaggaacagccgtgtagaagttgaaatctgaatctgtagtaatatttacagaggtggttgctttgtttattgcttctcccaaatgagaattaactatggaaaggtaaataaaggccacttttattggcaactctttttgttttctctacagtgattctttgttaagaaacaagccaaataccatcagtgttgtactagcaaaaggaatacccaaattatagattaaattgatttaaaaaagacaggatacttctgtgtatttgtagtaagtgatttggcagatatcctcaaggatcaagttgagtctgcatttttgtataaatgtcagattttctagcaaagatatttcacaattaatagtactaaactttgcttactaaaagtatttaggattcagtgtattaacaaaactctatagtagttaatataaataatattcgttttttaaaaattagtcttaattgcacattcctggaaagtattgtgtttttttaatctctgcaaaaacaggattttaaatattttatgtcataaaacttctgttcattttcttttgctgtatgaaaaaaattaataggattgatagagtctccatttttcttttatgattgcgttttagcggggccaatttaattttaaactgtagatatatttttttactgtatttgctgcattctgtggaattgaattgacagggtatagagttgtacacaagggagtcagaaggtacaattagccatttaagtacattttctgcaagatagtgtttaacttttaaatttctgttttgaaagtttgcccagcaagtatatttgtctatctaatttagcagtcaaatgacaaacttcaatcttttgaccttattttcagccacactagtaaatgcaatcttgggttagtgtggcaatgccaatgtacaccaattatttgtggtcacattgtgatgcctcagtctcaagggatagcagaataaatttttttatgttgtatattcataaaaatctttaactgtccctaaagagtaatttttatatgcttttcaaaaattttgaaaactagattctataatatgtttttatttaaactatgtaattggtttacactgtttattattaggaaggtaaagcaataaaaccaaagtcagttagtggcacagctgaaacctgagctcaggcccttatattcctcatctagcaacaccagctatgtatatcatctaccagctgtgtggctagtgcttttaatctgcaagtgaatttcctttaaataccatctgagggccttcgtgtattgtgtggaaagaaagagccactctttgctatctttgtaactatccctagtttttggggatcctgctagagatatgacttacatgctgcctagtaagattttttttaatgycattttcttagtgctgttcatcttcttgtaaacacactcacatgctgtttgaaagccgtcgaagattagatttgtagatgaggaaacacccagcacattgtatgctgcctttcctgggccacacagaatctagttgtcttaaccccctctcaggttccttttgggatcctatgctgtttaccatttctttaataatttctcaactgctcctttccgcactctccctactttagttaagttgatgagccccaagcaaaaagagttgttggacccatgtaggatggaggcagtgtggtgtaggagtaatacactagaataatcactgggagattttgttccccgactggaggagctggtccagttgttctgtatctcagcaaaaagaggtcaactgactagaatgtagtgattctggaaactaattgcacatcagttttttggagagctttttgcagtgtgtctttttcaaaagttgagattattctagtgtagccagttcatgaaccagcttttgttctaaatgagggtttctcgaccttgacacaattgacacttagggctaaataatttgttgctgtggggactgwcctgtgcagtatcagatattgaacagcttctctggcctctactattgcacttctctggttgtaacaaaaatgtctttagacattgccaaatgtcccatagggagaagaattacccctggctgagaactattggtctagatcatttccagaatcactttggaaacatacagttctggatttcagctctggcttgctcatttttttctagcgatgtcacctttggcaagttacytaaccattctgagcttttgtttcctaattataaagtgtgctgataatctcctttgtgcaagttgattgtgaggctgtgtccaaaccacctggcctggtgcctcctcagcagttggttccttaagtggtagccattattctctgattacataccacatattttcggaatttgtccttcttcccaaattaaatgatcttgtatctgtactacacttcatcgtgttttgatttttagttcttttctccaaggtgcatatccagtgtgtgtattataattagcaaacttaataagcagcaaagttctcatttagagttttccttatgtaataggtaataatggaacagctagagtcaaacttctagaattgctttgcaaaatactgggagaaagttaattatgacgtatttactgagaggagattaaataaaaccagttaaatgagctgaagtccaaaatgagattttaggtagacatacctataggtaccagatagtaaatatttggacagcaaaacaacaaaactatcttcttttaaggtgggtagcccatcagccttgatattttctttgaaaaaaaaatgccttatcttgcatcatctttttatttatttattagagatggggtctcactctgttgcccagtttggaatccggtggtgcaatcatggttcattgcagcctcaacctccatggctcaagcaatcctctcaccttagcctcccaagtagctaggactacaggcacgtgccaccactcctggctaaattttttttttttttcttgtagagatgaggtcttactatgttgcccatgctggtcttgaactcctgggcttaaatgatcctcctgcctcggcttcccaaagtgctgggatttacaggcatgagccacctcatctaacctatcatcttttaattcaagtggtttttgctttagattttgtaacttgggatataatcttcataccattccctgttgttaagtgtttcttccactctccgaaaatttttttgtatttttccttttttaactttatttttaggttatagattaaacatatcattgatggagaaagaaaaatatcaacttctgttttttgcagggggaggggttaaggttaaattatttctctttgacccatattccttatttaaaatcttaatagctatgatcttttcgtacctttggtaaactccctgaatcaatttctgctttgaaatattaaaaagaccttttgtattgttgagtctttaaactgtgcttttttttgcatctgctagtaatatgacagaatcatctgttatgttctaattttgagagcagacctattattcagacttgtttatggccttaaaatttaattttttctattaaaagataatatgatcaccaagtgacttttcaacagtataagctataggttgtggtgttctctgtcctgcttttttgatgctattcagattgaaaaaataaacattagtgccccttttttatagaaaaattaatggaactttatatatgaaaaatatttgggattttttcccccagaaagtgagtaaaaaatagtaagtttatgcttgtttagcaagctatttctaatgttgaaaagaaaggaaatagtctctaattaccccatctatcagtttaattagaaatgtgttaatgttttgtaaagaaaaatttgtgatttttatgcctaggtgatcaaaaatgtatgaccttataaatataatactcatgtaaaacacacatcccgcatgtttctctgactggtactagaacctagccaaatgattaattcatgagtactttctgttatgatctgtattatccaccatttgccattttctcttttcttgttggtgtttgttgtcataggtaccagcagacaggtgttaggtggctgtgggaattgcactgccagcargcaggaggaattctgggagatgaaatgggattgggcaagaccatccagataattgccttcttggcaggtctgagctacagcaagatcaggactcgtggttcaaattacaggcaagtgctcctctgcagactgtcagtctgtggagctcaattaatatttcatcagatgtattgctgtggaggagggtcttgtgaattattgatgacatttcaattacaatattcctttaattcttttagtgggggacatcaaaggaaaaattttacgagacaatggagctgtagggcaggagaaattaaacatgtaacacttttaatgaattccaggcattgatgcttcattttgcagatgagccccactagatattttgggtcaatacgatgtctaaggttagcttctacaaagggattgtttacaaactcaattatgttaatatcaatagtttacacaatatggaattttaaattagacataatacctttagttccatttattaaattttacattaaaatatttgttctggcaggagaccaggtgagcattacagtaagtacaaagtctattcatggggagagttggagctttgaagaagccattctccctaatttcctttataatgagtgtgcatgatagcatttctagatagcttgctctctctcttgtttttgaatgaagttacttgtctgatccctgtgttttctgcccttcccaatctatgaactttatgtaataaattctaatgccaaaacgtaagcgactacctaaaatggtagaaaactatgtttagatgttaatctttattctctttagaaatttaaataaactattaaggcttttgtattccagaagaataagcatttaatctatttgatatggtaggactgaaatactttattttgaaagaaagtactatgagcacttccatatttaaactgtaaattgactctgtagaaatcagtattggtaaaaatattggtcggtaaattatgtaggatatttcatcatactgaacccagataagtccgagctccttgtgtttcagtaggcttatataaagagtaagagcaaggtagttgctagaggggtgtgcccaggaaacctcagacactccctatatatgatttggagataacctttacagtagtgtcagtgtgcctgaagtcagcaactgccgaaagttcttcctactctccagctcatcagcagcgaaatgcttagtagagagccaaatatgaaccataaactgagtcaagatcatgtttctttagtctccagagtttagtgttttatttcttactctttcgttaagttagcagatcaatacttctgtgaggagtgtttggagttttagaatattttagaacgccagttgcatttatatagatgtaggaaggggaagaaaacacttggagatttttaaatgctaaacatcgtgttgttgttgttacaaggaagttatattgaagcaggggattttttcaaagatgagaattctattacattttgcttggaagcatgtgaaaacattccagaccaaaggaaaagttgaagttccaagtgggcatttagtgtggtcttatctatgactgttaatttttttaatatgctttttctgtttcaaataaaatgctttttctgtttcaaataagctctttggttggcttgttttctgcaactctgttgggtgtttttggtaactagacaaccccaaactcctccaaatggtttctaggactctttctttccttaaatggtttctgggattttcttatttcccatttcatttcttttctttgcttcccttcctattatcatcacacttatgtggagtccagtgctcaggtcctaggagaactaaagtcatccctgcagtgtagttttgatctaaaaattaaaacatgctctcttgggtggtgacaatcctactaagaatgaagtcaaggctaataatgaacagcagctgtaatcaattaactatcaatgctcatatcctcttctctataatgaaataatgtggcatattggactacatcccagattgtctttattaagatggtattggtggaagtggcttgtgagaatgtggtgctgcaccacaaacacctgggctcctcatgagtggaagtttacagaggagtgtggtcccccccgctcatatgtaccagggcggactggaccacatcttcctaacaactttataacacatcctcctctggaaccagatgaacttgggagttctctatayttatgtcttacagaaaaatagctcttaaggtcaaatgaagttctgtgtgagctgttattgcctcattggctatgtatatttcctgtgaactcttacaaactgtagaggggccctaatttgagatgattttggtgttgtaattttaaggaccatgaacattgaaatgggaacagtgtctctgtgataccaagaaacttcatggtaaaagaagtttgatttgttattttttaaaaaatgtgtgttgtatgtgtgtttctagaagacagagaaacatattgcttatggttaataaacatctgtactggttgctgtgttccccttcataatggatacaccaccttcttttcactttgccattcatattataatgataggcccctcaatcttataatgaaaaggaaataaattgactttcaaactcagttaattttttaaagtcttggatatcatttggtaattcctaatgttattgaatttaataaactttcaaggataaatattttactttgtagttcctggtaagttctgggtatgactagcagatttccatcctgcaggttgatatatttgaccatggagctattggctttccctaaatttattaggtaatcaatggtaatcaaagattaaaggaattgtagtctgtttggtaattgatgctaatcactgtagtacacttagccattactcatgttcatctcactggtattaagagttaggaaagggtggttcagttgacgatgtgactgttaatggagttgattgtcctgctgtggtccagcaacagtctaggtctgctcctagatctcaactcagcgtgaaaatctccaattttttctactaaaggggaaaatggcagaaattaaagggcatcttgataatgccagatagatgttcagccagaagaatatactagccttagataacaaaatgtgagtcatcaatgtagcagtttgcagaaggcacattataaaagagaaaaaaatactgtataacctgaaaaaacatatgcatgtgtttatgcttatttgaatgtgagtttgttgtaaaaatattttagacagcttttgattggttgtttcctaatccctgctaagtgcatattgatgataactcttttattccccttggaggatagaaagaagctggtgcatttaatccttttagaaaggcttgctgccatggaaggggccaggcagagtcccactctccttggggagctcaaggggcacctggacaggccctgccttggtgaggagcatggcttagaaactctgtaggaagagtgtcggagtctcttgtagcctctggcttcttgtagtctggccctttccacccagttgaagggcagggayagtgactgtagctggaggcagggagggtttcaaagtggacataggttattttgttaygttggagtataagggtaggcctcatttaagttagggctttaccaaaatttcattgtttttctatagaactacaaattatttttcagttgtgtagtagatgatttttaatatttcaagcattgtatgatttactcttcagttatttgtaaaaattgtattttgtttgtttgtttgtttgttctgagacagagtctcgctcttgtygcccaggctggagtgcagtggcacaatctcagctcactgcaacctccgcctcccgggttcaagtgattctcctgcctcagcctcccaagtagctgggattacagacactcaccaccatacccggctaatttttatagtttaggtagagayggggtttcaccatgttggccaggctggtctcaaactcctgacttcaggtgatccacccgcctcggcctcccaaagtgttgggattataggtgtgagccactgtacccggccaaaaattgttttaagttcaggaataatttatttctgagctctagtaagaaaacaaaaatcacttatgattccccaactctgaaataatctcttttagcatgttgatatattttcttccaatcttaaaaaatgttttaatttaataaagccagcattcattaattgcttgctattaggtaggcattgagatcatttgaagaagagattatctctgctctcacagagtttagggaggatctcatacaattacagtaaaggtgatttgtgttttgtcagggttaatgtggagtgcactaaggaagagtcgttaacttgtttacagagaaagggacagggaaggctttgtcgaggaagctagagatctgaatgttgagtagaaggtagctggaggggtaagagggtaaccaggacatggtgaaggtcgattggaggaagggaagacggttcaggctggtgggctgctagccacaggagcaagtggtaggataatggcagtgagaggtaaggcaggagagatgagcagaggtcagtcttcgtggcctcgtaggccacgtccaggtgtttaatctctgtcccaagagcagtgggcagtcattagaggctttgaagtgagaggatgaggaattcaaattttactgtttgaaataatcatcctcggagatgcagtaacccagatgagagaggagagtggctggacctggcatagcaacagtgtagacggagagacatggcgactgaaaggattcaggaggtaaaaatgatgtgaactcagtgtaggttgctcgtggtggagagcaagcaggtctgctcaaggatgaggcctaggtttctgatttgggcacctggacagtgggacaaaattctttccattggtttggaagcacggggacaggggacagccaggtaggggaggatggcgtgtggtgctttggggatatyggcagtgagatttctagtgtgtggtggtttggagttccgaagagtgatctgggctggagacttagatttggcattaccagcatctagaattgaaattgtgggaattagtgagatagaaggggtagtgtatacagtggagtaatgtatgtgcattttgcttcacacagtcaacatctttgtggggcaggaaaagggagtggaggagaggaatgacagtgtgcagagtgcagtgactctgctccaggtgtgtgagaggcaggcgtgtggccctgtgatgccctcagtcaatcccagtttttagttgcctcttgtagcatgagctgagtgttgttgaagaggttgccacggttagttttgacttctgcttaattttcttcttatgcactgactggcacccaactcccagcaagactgaaggttaatgggctacagtaatgggagtgccgcttgtggagatacaagctcaagagcttagctaaagggattggtctcaaacaagaaaagggacactgtccctttgtcccagaagggcaggaggagtgcagatgcagacagggaatacagtgtaggaygtatcaggatatttgactgcacctaagtgaaacctggcctcaaattgggttaaacattcacaaatgtatggtacacctagaaacctacagagggggaggctgtggacacagcatgatcagcagctcaatgatgtcttcagggacccagatactttaatttttgcctaaggccaggtgtccttgtaatcattagatctccttatcactgtaacccagtgaccattggtctgtacatgtagccagaaagaccaggagagaaaagtctctcccaacccagaatgtaatttttccttacaaagttggtcagtcttgccaggccagcttcatggactagtgagagtttcaggggagtaccatgcactgacaggttatagatgagccaggattcctgcttctgagccaggcagtggtcagagtcccataaactgtgtgtctgcagtaaggaagaaggagggcacctgcagagatctgattcttcaggaaaaagggagaggggaatgcatgttgagacaatggccacaaccagtttttctacgtatacctatgtctaaggaaattggggtgattccataaataatttttaaaaattatgrtgaacatttttctagtttattaacttcttcaaaatgattttaatagttatatgatattccatcttatttaacagaatcttatagtattttctrtatggtcctgttctaagcactttacagatgttaactgatttaatcttcgtaataaccctataagatcaatactgttattattcccatttgaaaatgaaaaactgacgttcccagaggttaaatggtgtgcccgagatcatacaatgtgtgcagagttggattcagatccaggcagtgcctctaaccactggcccatgctttgttaaagaaatgggatagttcattcagctttcctcttctccatggacataggtagcacccactttttctgcagtataaagaatgctccagtgtgtatcccagtgtgtaaatgtttttattgggattgctgggtcaatgcatgggtgctgttgaggctcttgattttgctgccgaactacctgcccacacagcagtgmcagcttgtacactgtcggtgtgggcttcccaggagagaacactcgctcggatgctcctccatggtgctttggtggtgtagaggagcaggcagggtggtgtagtgaggacaggctgcagtaagtgaagactggctgctaggcagccctctgtcccctggtagccatgtcacctgggccatgccagccttatgagcccccatcagtggagcatttctggcctacttgcttcctagggcagtgagattgaaattctgtggcttgaaaactcttggtagactataaaacttcagacaaatttaagattctattatgttcacttaggttaagatacactgtataaaaacttcactaatctgtagtagaagggaaaagagtatttttgttaaataatatttgattatcttttatgttactatagatgttatatctcttaatatattattaagtgttttctcttaacacctacatccactaattgatgaatgagattatggagattttacttactgggttttaacatcagtaactttttcttaaagaaaatatcaataaatttccrtagttagcattgtttttttgaactaagttttttgtttgttgttttgggggatcttttgagcagttgatgactgtatatgctctttcatggttgttttcttcttggacgtttggatgcaggtttgaggggttgggtccaactgtaattgtctgtccaacaacagtgatgcatcagtgggtgaaggaatttcacacgtggtggcctccgttcagagtggcaattctacatgaaaccggttcctatacccacaaaaaggtaacayaatatttcagtaccttttygttttgttttaatgccctccattttacatatttggtttttctctgatccatgtgtttctcaaatgtatattcctgtgttttttttcctgcatttaaagttaatttattattattgacttactttagagctctgtgttttcagaacagttatgaatataggtcttattgttmtaacagtctgtggtggtgttgtgacaatgtctgttgtccagtaaaatacgaatcatctcagacagggcacaagcctggcagtgtgggttggagtcataagtcaggtggctgcgtccagtaaggagagactttgcgcattagtggcttcaaacagttttaggaaggtggatacagaagtaaaataacaactcttaattggtaaatgcatttgttagtatgcatttaaccttccatcttgagaatttcgcaagtattgttgctttttagttgtgttttgttccttgaatccttgatcgtcatgtattgacagttgtatttcttcacttagagtttggtaatatcacagtatcaaaaaagagctttatctgtgctcctgtgggtagcatagatacgttgtattcttccttttttcttctcatctgtctaaccatccagactgtgagctctgttgagtagggactgtgtctgattcatttttatatcccgggtgacccataagcatttgctgaataaataataatcacgcagtttcactgtgaatttgcaggttacattattggggagaagcagcagtctcttaggagctagttctttctttcctgagtcttctgagctcttgagttcgttctcrgggcccaggaaagcagtgccggctgcaagggctatggagtgtttgcctcacggagtcagatgcacggggaccacgaaactccaggattcctgttgtgtttgtgttcatggaaaagcaaacttttgatagaagtgactcagaaaaatctatggtttggtagcacaaataaggcgagatggaattttgcttacactgttattgttaaaaccaactgactttgcccagaattttaagtgataaatggaaaataaactggataagataattaataaattagggtaaatgctgtgagttataaaaagtgatttttagcagtatgaagataatagcagtatagattgttgtctagtcaaaccttaaattgtttgtcaaaccttaaactatcctgtcactacccttgtaaaacatttgtggttcctttttcatttctgttatctgttaacatctcttagtgttttgtgctgcaaaatcctgtggcaggactcattagctgatgttygtcttataaaggcaatttaaaaaaatgttattcctttcattttcttttggggtagtaaagtgtgtgtattggacaccttcacctggatcatggcttgcctccagttcctttgtcaccatagtttgaagaactgccttcgtgtaaaccacatacatggactcattatggaaatagaattgacagtaaatttggtgaaatttgtctccttgactttggagggcaaacttctaagaagagatatttcacttttggttgcagtggctttaccttctgaggttgttttaccttcacagacacttgcatacatatggttgttaataattttttcagtgttttacagtttaccaaggactctaacttgaagattcttaattaacttttgaggaaaaacagcattacagtttccttgtgtttttactcaaactcttaactcttcctactgttccttttccattataaagtatcttagatcactaaagatgtaaactgttaggcaaaagatcaaaaatatgtacttttatatgtatcaaactatattcttaacttagaagccctatatttattacttttcattaatgttaatattggcttatttgtggtgacgacacattggaaatgtattaatagttcctttccataggccttactattgacatttctaagatcataactttggtttctggattcaactactgaaggggtatttgcttcctctgcaccttcgatcttctgtgtatgtgcagatctctgtcaccacacatgcatacctgctggcttacacgtgtgttaaattacaatagagtctatgtttcttattcatatttcaaaaattctgtttgtggtgattcgtcctctaactcagcgtctaatgcctgacttccttatcagctgtgatttctttttacagtggatgagctttctgtgcccaccagctgttctgtctgaatttaataatggtactctgacattgggacattcaatactggatgtattaggaacagggaagagaagagaatttctctttagaaatatttaaaagaataataatgccagaattgttttgtttatcgttcaagtagattatctttattttccaaatgctttgttgtagctggtatgacataaattttgaaaattggccgggcgtggtggctcatgcctgtaatcccagcactttgggaggccgaggcgggtggatcacgaggtcaggggtttgagaccagcctggccaatgtggtgaaaccctgtctgtactaaaaatacaaaaattagctggttgtggtggcacaygcctatagtcctagctactcgggaggctgaggcaggagaatctcttgaaccctagaggcggaggttgcagtgagcctggactgtgccactgcactctagcctgggcgacagagcgagactctgtctcaaaaaaaaaaaaaaaaggaaaatttttcatttggaaaaatatcaaatggtcaatttctcaattaagcacatctatcattcttcttccccaagttgccctttagcttcccacctctctcaccctttgatcctatgttatctttgttaatagtctctgattggcagcataatttagaattgtcaaatgtacacccagcagccatgcaaaaaaatatacaactgatagtttcaaccaaatgatgaaatctgataaagaaatttttaggcttctgaatctcttttaatggtcacttgaaatcgcatttaataaaagttcaagatttcctttttctgattatatttmgtgatccttttttctaatatagagcaactttcatgtgagttgattaatatttatttgttaaaacaacaataaacactgcatttcaggtgtttgatgttgctagggctcaaaaaaaataaaggatgtttttaactaaccttaaaaagccaactctttccttggggaaagaaaatgtagtaaatgaagagataaagaaggcagtcttgtgatacctatcccataactcacagtaggtggtgacatctttagcactgtcttgtaaagtttatttaatgattaaggatttttttttcaatttattggaagatacataatgataaattgcttatgttctgaaacagttgtctctctcctacctttttttgctacgtagtctctagtagttctgtaacatcttaggtaatttaaagagttttgtttcgttttgatcaattcatgacatgtagatgcataagagtgggaaaagcaacaagagcatgcagttttaagtgcattggttttgtgcttacaagaccagggttcgaatcttggatctgctgttttataactttgcaagcttgggcgaatcacttgccttcctgagcctgatttgatcacttataaaatgggtaaattttggtaaacttgttaggactttttgggttaatatgtatgtatgaagagcttagtgtggtccctaataggtaacatttactcaggtaattcttgctgttgttagaaacaaagaatatttaggcctcttcacctcagtagttgggaaaagaaaagatgctgaatgaggcattgctgattgactcagtatgtagtctagagagaaggtacacatctactttatcaaaaatgttcatggtcattcaagatcatctagaccttttattctcatgttcagatacatttggccccagatggaaacagtgaagtgcagggcgtggttaaaaaagcaaataatggcctggcacggtggctcacgcctataatcccagcactttgggaggctgaggccggcggatcatgaggtcagaagatcgagaccatcctggccacatggtgaaaccccgtctctactaaaaatacaaaaaattagccaggcgtggtggcaggcaccttgtagtcccagctactcgggaggctgaggcaggagaatggcgtgaacctgggaggcggaacttgcagtgagctgagatcacgccactgcactccagtctgggcgacagagcgagactctgtctcaaaaagaaaaaaagcaaataacacaaaaacttggccatccgatgaaactcccatcaacatgttctttaaaagggcctgttttctgaaacactagagcaaaaagacgtggctttaaaaaaagctagaagggagtaaaaaactttaaaaaaaaaaaaaaaagaaagaggccacattattccttaagcatctgaaatatttcagacacattctgagtacacaaattataatagaatgcaaagtggtatcattcctattaactttagagtcagtgtatacaccttatagaagacatgatagatgctgggcttgttctgcgaggtatgttgtaaaattgtgttgctggagcccttttttttcttattgtcagcacaaatccttgtttattaaagatttagcttgaaggaaattttaattaattacaggtgcagtaaatcctgcctaggaagcggctgtactgtgtttcctgtgaatggccttcatgtgcctgtgcttcgctcctctccccgccgcctgacagtgtgatttatggctgttgttttccaccagtccactgtttgccctctaggagggattggtctcttgagcctccataataacagcagccctttcacagacatcttctaatgacaacagcactgcattcagtaagtcaggctaattgcagatgtaccctattaattgcaaaaactaggagaggttacatattttacaagcttttaatttgaaaccgcccgagatgatttgtcttaagtgtttggatagagccgtccataatattcaacaattcaccattattgaaactccagtctaggcagctatagaattctgcgattgaatcaggtgataacaaatagtcttagatggggttttgcccagtggctaagtggagattatattttcaactgggacattttgaacaatttcttgttctttttacataagcatctttttaattcttgttaatcattaatacatcttcctgaacacaggaagttttgtatttctatagctaacatttctatacctataataatatttagaattttccagataaatttcaatccttaagcaagcataagaaactaaacatcattccagtggtatacatttgggaagcttggtgtctcatttggtaactgtgggaaagctccagctacactaggtgatgtccagaattcatttcggctttggcttctaaaggtcgcaggtctgaccaggtgaggtgctaaaggtggatggtttttctctgggcagactgctttcttcactggcaccagcagctaagtggggctggtggcgagggagtcctgagggaacccgtacgtgtgtttttaaggccgttgtgcaccccaaggcgtttattgctgtattcttgtgaggtcaaaagtcaggaaatgggtctttcagatgtggccttcaatatggtattgtgcaggtgtcgaattttgtgaatgggaagatggaagatgagtagtcataatagtaataaaagtatggcacacacctgtcaaattattaataggtccaggcattgtggttattctctgcagcaattgtattaactctttgaatgttacatgaattacaacatatgagaagacaatgtctctttattttgttccttcagattttcttagcctttcttgtacccttttatactctgttgaattaaaacacattttaatcctagttctttaagaagatataaaattaccattttttgaagatgttgaattttataaaatttgtattagatgattgtgattacatgaattatattaggcttcctgatagctattcttgtattcctgtgataagcctttagtaggttaatatattactaggttttatctgtaaagtagtggatctctagtttagaggcgtgtatgcacactcataagtgtgctgtgtcagttttgaaaacagggtttgctagccttgtaacaatgattggaatccattctttttctatattttggaacaatttcagtaataggatctagtcctactttactcataaaacccctttgggtctggtagacttttggtgagaagagtataacatctttttcacattgttcagtattggtttgttctgttggtctgatttttcttgggtccatttttgcaacgaactttttagctatcatatctgtcaaaatgttcagattttgtagcatgtatattggttaacacttttgtattctctacatctgtaattgtgttcctttgacatttctgatgctgtacatctcagtctgttattttggctcacttttcagaggtttgtttggtttagtctttccaaagagttattattattttgctttatcaattctaccagtttttttaatacccactaatttttatcttactaattctctcattttccttttttgggaggctaagttgactgctctctttgatttcagcttttcttaatagagtgtttgtaaagaatgaatattctttgtatagtctaaagtgctgctgatcactgttgaaaggaggtctgatggtgatactcaaatcctttgcatcctctttgtaaatgttttattttctttgatctgactttctctcagagaggctgtggtcagctctctgggtaggctgtggatgtgtcattttgacagctctaagggccctgcttttgtgtttattgctgtgcgttttggtaggtaaaggttcatggttcttttttcttattgtggcatccccattaaaatataaaatatccctctttctgttcactcctttttgtttcatatttacattgctaagcctgcccttttttggttggcatttctttgatatatctttgataattcccatattacaactttcagtgccagtctggtttgggtctcttttaaacagawggctaggtttttgccttacccagtggaatgtctccctgttaataactcactgtcttgtggtgggttactaggtttagtttgaaacctggtattttgttttctgttttatattgtcctgatttttgctattttctattattttcctctgtaatggtttgatagttctacattctattttctagtttttaggtggaagtagcaactgttactcagtaatcagcataaagttttggcaaatgtattttaacatatttttctcacatagttaagaattaaatatctattgcctgtgtacctttctaccattggacagggtggaatttttagttcacttttattttcccttaatctcaatccagcttttatgaaactgaacaggaattacagtaacatttaaaaatatataccttttaatattttagatcccctcttaacagtttcattcatatttaagtgtttaatatttaggctttgttgttatgctttaatgatttattttaaatggtatgtatatcacatacaatcttctttttaaactttttcttttatattttagtaggaggtagtgtagcctagtgtcaatagtactagctttggatttggctgcctttctccattcgaattctgactccaccacttagcagctgcgtgacctggtacattagttaccatttccaagccccagttccctcatctgtaaaatggggttagtgatggcccctctgtccttccttggggagctgctgtgagcatggtctgtggtgagaatgtggtgcaggagcattgctgtctttccttcttcagggcatggcatttgtgcatgccttcctctttgtccacgactgcaccactccactgtctgggtgcagtgcactgtagttagccaatctcttggtgactgatcttccaagtccttgcctatctgaagctggaatttgtttattttattcatcaagcatgactgctagtttggattgatgtagaatccatggtcaccacttttccttcttagaattacgtaaagattttcctctttgccttcggacatttttagtgttgcagaaaagatgtctgatgcaggtagtctttttcctctgaagggaatattttctttttctgttttgttctgactagaatctatgacattttctccttatttttaaaaacatttttctcttttgagtcaggatcttgcgccgttgtctagcctggaatgcagtggtgagattatagctcactgtagactctaactcctgagctcaagggatcttcttgcctgagcctgctaagtagctggcactgcagctgtgcaccaccatgcagtgctaatttttttattttttgtagagacagggtcttgctttgttgttcaggctagtcttgaactcctggcctcaagcgattctcctccctcagcctcccaaagtgctgagattacagacataagccactttgcctggctgtttttatttatttttggaattcagacatctagtaagatatgtctacagatgcgtctttttcttagtgtctctgcctgacactctgggagatgttttgttctgtagattcaaatctcggctccatttatggtgattgttttctaacattttctttttytttttttctttttttttttttgaggcagagtctgactgtcacccaggctggagtgtagtggtgccatcactgctcactgtagccttgacctcctgggctcaagggatcctcccacctcagcctcctgagtagatgggactacaggtgcttggcaccacatccagctaacttttaaaatttttttttagagataggctttcaccatgttgcgtaggctggtctcgaactcctgggctcaagcaatccacccacctcagcctcccaaagtgctgggattacagttgtgagccactgtacccggctttttttctatcattttaaaatcattgcttttatatccttttcactctgtcctggaattcttgttatacattgttagagatcctagatttgtctgccttgtctctttggattttctcttattttcttgcttttgttttaaattaatatattttccatccacattgttgttttgacaagaatggacacaaaggatgttttgaaaaaataaaaataataatttaatatatgtatatatttataaatatatgtattataactttgtcatctttttgagagtctccttcccctaataacggctgtattagtcagcgtttactacttgccaggttaacaagtacacttccagtgctgataatgtctgtgattgtgcatgttatgtttgtatttgtgcatttttataaagtactttagattgtgtcatgattgaaagggtgtcacttcttatttaaaactgactttaccattttattgtggtctcaggagaaactaattcgagatgttgctcattgtcatggaattttgatcacatcttactcctacattcgattgatgcaggatgacattagcaggtatgactggcactatgtgatcttggacgaaggacacaaaattcgaaatccaaatgctgctgtcacccttgcttgcaaacaggtatgacctcttttaacaagggagatttccargtggagaagaataattaattcagaataaactatctgcttttagtaacacatttattgaatctttccttgtgccaactgcacaagaaatttaaaatgtgcattttccttaatgcagaaaactctttatttttgcccttaatcatgtctttaattctgattgttcatgttatttaatgtctcttgtaggggccagttgttagaatgtaaccaaacccaactctaatctatagtattcagcttcaacaataagaaaaaattctttctcattttttcatctaaatgtaattaaggatttgtaattgcataaaatgtgtatgttttgragagtaccaaaatgatgcaagaatgatragtaaatgtgtaaataatttgcagaggagcgttttagggtaggaatggcgattgctaaaaggtaaatttaataaaaaggtgcttcctttcctcaaatagtttcgcacccctcatyggatcattctgtctggctcaccgatgcaaaataacctccgagagctgtggtcgctctttgacttcatcttcccrggaaagttaggcacgttgcctgtgtttatggagcagttctccgtccccatcaccatggggggatattcaaatgcttccccagtacaggtaaaatattaggatgataatacttttggcattttaatatttaaagtgctcctattaaatactataatttgtagccaagtcattcagaatgtgagaaagatggccaggctcataaattggtatctggttaaaaaaaaaaaaaaaaaatcacaaaattatctttgcttgatcatattttttcacttaaaacatcatgaaaactattcacagagaggaaagccctagaataaaatatctccttgtttaatggaaattaaacagttttggcattgttcctgggatgtttaaaaagatgtcacatgtggtcagaagagcagttagaaattatgaaacaaggacaaatcagtttggaacagcatgtaatttagtcctgcaaactggggtagtgcatcttataaagtagtggagaaacttagaaaaggggacactaggaggattggactgttcagggatgatttaatgagacatgccccttaacctgattctgggaatgtaggccatggagagtgagggcattcttgattagggcaacagtgtggatgcagccaccatatgtggcagggcgcagtgaagagacccacttgactggattggagatgcttgtgggggcatagctaaaaagctgtggatgctagaactgtggggccttgaaagggaagcagtggcactcagggagggctgggttactgaaagtgtctgagcaggactctggaggatgctggttctcaggggttcctcaggctacagggtagtcacaagagggaggctggcactgagtgacctgcaggaaccactggggtgagggccatgaggacctggacctgatcttgggtggtggtctgagaaagatggtggggcaggagacgcaggtggcatttttaggcagaacaaacaaggtttggaggctgacaggatcgaggagatggagtaggggctaagcttgctgtgaatgactgactgactcctgaggtttcaggcccgggtgcctgatggaatggggtggtcacaggcagaaatgccaggaggtgaagttagccatagggtggtttgtggcctgtatggcaggctgcagcctgggtgggaggcacggtttctgtgcatcccttcttgggtgggcctgtgcctaccaggtcatggctgagccagggatgagaccttccaccaaaagggaagctctcgtattttggagtatttaattagaaaaagaattttagacctttaagattaaaagattgtcaaaaacaattttaatatattttacattttgagattgaatgattttcagttaacttttgtaaggagtctcttctttctctgaatctcctgttataccattcttttttttaaaaaaatttattttgaaataatttcaaacttaacagaaagttgcaagaattttaaaagaacaaacaaacaagaaaaccttcttaacacttcacccagattcactgattgttagcattttgcaaacattttgccacattggctttaccattcctcccctccctctcccacacctctttccatgtagattcacagctgaggttactgttttctaaccacctgagggcaggttgcagatctgatgcccctttctccaaatccctcagtgtgtatttccaaaaacaaggatcgcctcttacatagccagtgtaagcaacaaaatcagaacgaagtttaacattaataggagtctgttatctagtctataatcactcatattttgtcagttccagtagtttccgtgtctctagtctcctttaatctgggactgtttctttgcccttcattaccttgacatttttaaagactataggcctgttagtttgtagaatgtacctcagtttgggtttgccttacatttcttcatgattggattcaggttatacattttggctaggaatatcacagaagtgatgtgtcttcctcagtgcatggtatctggaggaacatgctgtctgtttgttccactatgggtgatgttaactctgattactttaaggtggtgttggccagatctaaactctgtgagattaccacttctcctttggcattaataagtcatttatagaaaaatkatttgagaacatgtcattatgatctgtttttttccttgaagttcttgtttcaggaatttgtgtacttatctttctccccttcctagcgggtgagatctttggaagcagagtattggttgtatttgctcctttttgtttgagaccatgttgccttgcattattgaattctaagaagatagtctgtgtgccggtatttattctgtcatgctggtgctaaaatgatggcaggggctagaaaccagaaccttcccatgaaggtatttccagtccagtaggggtgggcacaggggaaaatggcaaataaacctggtcccagtacagggcagtgaggactgtgatcaggggagatgcccagtgtcagagcttatggggctcagaaaggcttctcggagaagggatgactcacctggggcctgaaaggtgaggaaggtgatggggagcatgtcagyagcccaaatatagactgctgctggggttggtgtgctcagctggggcagggcatgtgagaactgagaagagcctgcagggacgcctagttgaccctctttattccacatgcaaggtttttgattctcagcgttctggtgacttgcctaaggtcactgtgctcaggaagaggcagagctctgccttgtcagaatgggaaggagcatgggcatgctcagcaagttgtctgttttccacagcactgggatgtgagcattggtagagaaatctagctgaatccccaccttgtgtttttatgaatagaggaacagactgggagccagttgggagtgaaacagaagatcatctccatggggtggcatgcaggagagagcaggagccacagcccggccgttccccagcctagccctggtttagttgaccagcacctccaaccagcatgctcgctcttctgcggaagggggtgtgggtggagggaggatgtgggggcagttttctttatagactgtacattcgtgcttcctcagtgggactatgtttttaaattctgaaatttcatcatctctgcatcagaaatcataatatgtacctcatcatcatcttcaaggtgatattcatcagtctgaatgatatatttaaggagttatatataactaaaagtcattgattagttgagcttcttttttatgtattattcaaagtaaagcctattttaatatttacgcacatgcattcatacaacagatacacacacatacatatatgtgcatgagtgaggtatttttagcgttctttaagaacattttttaacaagttaattttttaacttttttttctgtgtgtgtggtcaagctcttttttattatcattcattttacagctgactttcttaaatttaaactttggttggaattttttccatgaaatagtaatttactaagttgttaagcctatttagattttttttgaagtagcaataatttattgactactttgcctgtaagtgaattgcagagggagtggttttctgggctgtggggctttttttttttgcgtatatttagtactcatctcatgtggccgtgctccattacagaaccatatgctgcattttagggcagagtgacctttcgtttctgggatcagagggctcttgttgaacttactcttgtaagtctccagtggacagtaatctctgcttattggctggctgctccatcactgtagcttttccccagagttagcttttgatcttcagctttgcagagttcctttgtagcttttggagaatacaagatcataaacagagatttgtacaaaagcagtttttcccctagggctggtggtcaagaacccagtaagtctctactttagggtttaactgtatagtaataattaaaggaaagtgtataagagaaataaggcacaaaattatcagtttttcttttgttgtacattttggttaatgagataatttttttaactgataatattatgaaagctaccaccccttggagtatatggaacttatgctagctttttcaaaccattttgcaatcatttcccactgactttatacagctgttggttattctttttttttttttaaggaatggaagcaattgagaggtaagaacaaatgcgttccttaaayatatatagtaatgttcccttctctgctcttattaaaggtcaaaactgcttacaagtgtgcatgtgtcttacgagataccataaatccatacctactgcggagaatgaagtcagatgtcaagatgagcctttctttgccagataaaaatgaacaggtctgtaaatccaggagttaacgaagcattcctaaagcacaagtgtgtctttcccttcactctgattctcctctgcggatgagagagtctggtgaggtatgatcctggaactgtgggcaggctaggcccgctgtggcgtctgccctcagtggattcttctctagtccacaggctttgacctccctcttactgacacatggattcctatagctactcttttaaacatctccattctccttaagcccctaattcattcatgctacaaattgtattaggtgccaaccatatgcctgtcgtgatcctaggctctgagatacagcagtgaacaaagcaagttttgttctcatggggactcacatttattcttgagggagagtgtcacaaaaaggtatagaagatgtcaggtggcagcattaagtgtggagacaaatgaagcagggttgaaggataagctgggaatgctgagggcaaggatttggggaagtgggccatttgtaagggttggtcagagaagacctttgatgaactgacacctgagcagaggcctaaagaaggcgaaggagcaagtcttgtaggttttgaaggcagagcattgcagatggtgagctgtggcagtgctttggggccttcatagacagcagggaggccagtgtggtcagggctgggagcaaggaggagggtagaagaggaggagctagctgggaagactggggaggctggcacagacaggtgcatgaacagaagtgaagacctgggcatcggaaggtgagtagggtgacctggaaaggacccagtgtgtttggccactaggaagtcatgagtgatgcctcagtggcatcaacagaggtgcccgtgaggcttgctctgggtgcgggcttcaggagtgactggaggtgaggaagtggaggtggggatggtacctaattttctcaggaatgcccccatcttccacttggaggctaatgggtgaggcactgtactggggagaatgagtgggtcttcagatacagtgcagaggtggaagggttgccctccatcctgtacaagaacctcttcctctgggaataaaggaaaatgaggtggatgcagaagtagagacatgttagggagtgaaaaccagggaatcatgcctgatcctggtaggttcaggtttgattttcattttgtttttatttgtctgattgtttttaagtagaagttgagacagagttgcgggtggcttgggtggtgaggagcatgggcacagttgctctgggcttgtggaagatgctgggcgggcatgcgtagaggaccccctggagcaggacaggccatggcaggatgctgccatgtatgagcttttctccagcagcaccggcactgaccataggtctgcagaagactgatggttgagttgacctacctttggatgtttacagggaagatgcagggggttgaaaggggtccaggtaggtggcagaggggtggctaaatgagcatccgtgggaatgtaactggcggtggtggactttgcgaaggagggagggttgagaggtgaagggtcacagagcacgatcgcatggagtggttggtgcagtgggctgggagggtaagggttgccgtccaaggcaagtctggtaactcatgggcctgcacttagagctccaggagagggagagctccaggtgaggttgtggtctctggtcaggtctgccgagtagagcatggcatgggtcatgggaggtgggatggtttgagcacttggaggctaacgtggaggatggtctgtgcacctgggcactgaacttgcccgtgagcaggaagccagtctttggggactgtgggatgggccctggaggtagacaagtgacagagatggaggggctggtgagcagggtatggtgagaagtattgtcaccctttgttgttttaatattaataatagggatatcattaaaatcgcatgcattgtgctcttttgatcaggaagttttgttgatattttaattatttctgttaattttttttttgaaattatagtttccttgtttttcccgtccgtaggtcttattttgccgtcttacagatgagcagcataaagtctaccaaaatttcgttgattccaaagaagtttacaggattctcaatggagagatgcaggtcagctaaaaaatagaagctggagaaatgaaytgtggaccaagagaagtgagrgaggaaaagaaactaggatctacattgtgccaggcttttcacgtactgtcatctcacttcacttgcatgaagtcccgcatggtagatgtgcagtcagcctatggcctggagccgtaaggtgcagaggagtaggtaactggtgaaaggtggaaagttgcagagctgtgtgctgtggatctgaacccagacgcaaatgcagctgcgagctgtgcagttactgttacttccgagggtcttacctggtaggtgggcgggtgtcaggtacatagctgcattttcccagatattatgaccagaattatatatcttgtggagaggatcatgaggattcataactttcatcagcttcctaaaggagccccattccccaataaatgtttatgaaccattgccatgttaggaaccagatataaatctggttcaaatgtccctggctctaattctcattgtccccagggtaggacagtaatttatttatggtgattctgttcctttcaatactgagaaagctctctttctactagtgtccagaattcagaagttcctagctagtgtcttctccaaaagactctattgtataaataatgtgagtgtgattaggtcatttcagttcttttaaccatctctcacaatttcttatttcatttcttattggttgctacaggaggttcttcagtcattcacatctattcatctccatgaatctccccttaacttcttcaggtctttccaagttagggggtctagatcacactatccaggaaagggaatgcaaactacacttggaattgtaaattttctagtagtcacattaaaaaggaaaaagagaaacaggtgaaattaattttgatatatattttatttcatatatctaaaatacattttaatatgtaatcaaaaattaaaaatgattaaaaagatattttactccttttttgttctgtcttcaaaattgggtatgtattttacatatgcagcacatcacaatttggactagccacacttcatgtgctcagtagccacgtgtgactagtgactactgcattggacagtgcagattgaaaggaagaagaatgagtcacggatgactctggggaggtttaccaatgttcctgacttattcagatcatttattgttaatctgtttactgttgtttactagtgatagctaccctaccctttgattattggcttaatggtgatttctcctctgctcaagcttttagaccagtgagtttgatttgaatcatcctctcaaggctggaagagccccattattgaagttttgttaatgttcttttgtggggatgggccggggcactcaccccttgtcttctgtgcccttctgcatggaccatatctttcccattcgtgcattcctattcgtgcatttttcatgcagttttttttctgatataataataatctaaaggtaaatggatcctcaacctctgactcatattaaactgcagaacttttagtgaggtaattaggagtgtaatatttaaatgcatttgataagtcacatgactgatgtctccaaatttaggttgataggacatttctgatccatatttaaaaggcgaattccttttttatattaggtttataataccgtgaactgcataccttttttctagtgagggaaaatgaattatcagcaattgaatatgacccctgtagacgtgttcagtccagtagaatttttttgtttctgagaacttgttctatcagggaaacaagatgagtgaaagttaatttctcccagctcatgataatgctgtgactagagaagaaactaagaagctggtggagaactgttttttagtctgtgttataggttaaacagcctccttgcctagggaatcttactttacatggggtcatctgagtgtacatgtactctttcttaccacagattttctccggacttatagccctaagaaaaatttgcaaccaccctgatctcttttctggaggtcccaagaatctcaaaggtcttcctgatgatgaactagaagaagatcagtttgggtactggaaacgttctgggaaaatgattgttgttgagtctttgttgaaaatawggcacaagyagggtcagcgagtattgctgttttctcagtcaaggcaggtgagtgcacagacttcagacgggaaacaggctggttctttatgacagccatcaactcacaaaatgggattcaatctaaagtaatgattctgaagcaagtctaccactgatgctgaggtggcagtctaccgatttctttgggagtttagatctttctctrgagttggtgtctaaaagttgactttttaaaaaagctcaccatgtgattctagtctgcaagtaagtttaggcctgagctttggctgtttacaaaagtaagaattaaccatacggaaataccaaaaatactcttttaacagttctgtttatctgtcctaaagcaagaaactccttttaacataggcctgttggggaaggtgttaccatttacacaaatagagaagcactcactgggaatgtgtatttgctttgcaaactcctatcccccacctccaaacagatgctggacatacttgaagtattccttagagcccaaaagtatacctatctcaagatggatggtaccactacaatagcttcaagacagccactgattacgagatacaatgaggtaacatgtgaatgtaacagggaagttgagtggtgctgctgtacgtggagggaaaggactaagcgtatccacacccttacccaccaaagcagcattgacatctgggcttgggagggggcctaaggggagacttgttgtttttaactctatgccctacttctggatatttgggggcggggattgtgggcatgtgtatgttcaaacaaagaatgcgttttctacagcatgtattttcctcctaaaaacccaatttttaaatatttctattaaatattaaaagtaaaagctgtgaaatgagattttgattcaccagaggtctctaggacattaccattccttatattgggaacagcccagtaattccatgtgtacaatatgtggaggcagaggctgagaactgtaactggtcttaagtgtgtgtgctcagtgttgtgtgtcttacctctaggacacatccatatttgtgtttcttctgaccacgcgggtgggyggcttaggtgtcaacctgacgggggcaaacagagttgtcatctatgacccagactggaacccaagcacggacacgcaggtttgtttttattttttttttaaaagaatgtattagtagaaatatagtttcatggttagcgcttttgactgtcctttgatgttctggttggcttcagcatacgtttcacattttgattgtctcctgttcttcaacgtgaaagaagacacccttcagagtcaaatggacaggaaccatcttcagcagtttatccatagcattcattcctagagttggggtaaaaagaacataggcaaagttacaaacattttttcaagtagagatgtcttgtcaactggctgttcatcttcctgagtaggccttaggtgtacttgacgtcatgagtcaaaattctaactctgggagtgacaggtagtgaccagctagctttgtttcttatagtcagtgcttgtcattgggaaggattctcgttgagaggtctctctctctctgttgcaggcccgggagygagcatggagaataggccagaagaagcaagkgactgtgtacaggctcctgactgcgggcaccattgaagaaaagatctaccaccggtcagtgcacacagtggccactcttggctgtgcgttcccagagtcttgagcagggaatttttccaaagtgttgtttttaaaagtcttaacatcttagaataatagttgctataacttaaggctttggtttttgttttgtattttttctttccctttaaaatatgcttagatgtcttactgtgagttgtcaaaaaatgtctttgaacctgataatttttgtaccttattctacctcaagaatcacatacatgtaaacttcatattgttatttgaaaggaatatttctgcctgctatggtgtgttgccttcagaaaaattttaaaaaatgacaaggttgaatgttaccatattggtgtttacataccacattatgcaggtaggatcagtgtgggtgttctggcagtctttgactctgatgccccttacaaagaagtcgacaggatggctgtttcgtcctctgtctttccataatgactaggggattttagacagtggtaacttcaacagtagaatcaagacattgccagcttctcccactcccccaccacagactttatccttgagccatagcccagcttttataggaagctctgtgccctttaccacatgctgggccattcctggaacattacatcttcctcgagggagtgttgtgtgagggtggaggacgagttggatcctgtgagaagagagcttccttttatagattcatgctttagctgggagaataaatgacagggagggacagggtggctggtggaggtgcctgttccagagtggcagtggtgtggggcttcagcagagtgtggacctgcaggtgggagcagggagagagaggtcagagtggagacattgcaaagcccaggtaagagagtttgctgagccctatgataggaaggttctaggcagggcaggacccttggtattcaagtcaaggaggctaagagagactatgagtcacatgatggcatgtgaaaaggtgtttcttgaaatgtgttagatcttggaggttgaaaaagctcattcggtgtaaataataaggtattatttctaatttaaattctgcaagacctgggagattaactgatgtattatatatttcytgaattgtaattttccaaggctgaaagtttgggggattatttagccattcatgcagcagctgttatcatctctctcttatattgctttataacttgaatttttaggtagagctacacattgttttataccagcttatcttttatttttttagacaaatcttcaagcagtttttgacaaatagagtgctaaaagacccaaaacaaaggcggtttttcaaatccaatgatctctatgagytatttactctgactagtcctgatgcatcccagagcactgaaacaagtgcaatttttgcaggtattacataaaatcatttaatttaaagtaatcaattgcacaagatgatacaatatagtattagtggtgtttttcctctttacaggaactggatcagatgttcagacacccaaatgccatctaaaaagaaggattcaacyagcctttggagcagaccatgatgttccaaaacgcaagaagttccctgcttcyaacatatctgtaaatgatgccacatcatctgaagagaaatctgaggctaaaggagctgaagtaaatgcagtaacttctaatcgaagtgatcctttgaaagatgaccstcacrtgagtagtaatgtaactagcaatgataggcttggagaagagacaaatgcagtatctggaccagaagagttgtcagtgattagtggaaatggggaatgttcaaattcttcaggaacaggcaaaacttctatgccatctggtgatgaaagcattgatgaaaagttaggtctttcttacaaaagagaaagacccagccaggctcaaacagaagctttttgggagaataaacaaatggaaaataatttttataagcacaagtcaaaaacaaaacatcatagtgtggcagaagaagagaccctggagaaacatctgagaccaaagcaaaagcctaagaactctaagcattgcrgagacgccaagtttgaaggaaytcgaattccacacctggtgaagaaaaggcsttaccagaagcaagacagtgaaaacaagagtgaggccaaggaacagagcaatgacgattatgttttggaaaagcttttcaaaaartcaggtaatccatttgatacgtttgccacagggatgctaggattaraaaatgagtaggctgtttctagcagtagcagtctttaactgatggtgcatagagggctgtcagccattagtgtttttcttcaaaaatttagatttgaaatatattgacattttaaaaatygtatttacacctcttttctgaagacctagaataatttgaaactttggaaaacaatagtacttatggccactcatgggaggtgtgcaattcttaaatcgatgtgtactacctgaacattagtaggcagttactttacatgctatatgctacattaatctgattttccaaccacaggagattaaagtaacatcataagggagagggacaagcgtgtggctagagacagacattctagaagtatgaaagctgatagcttatgtcaagggagaaaagttaggagatgtagactcaacaattgctcaagaccatggagtatatagatagccctgcttagtgatcccttagcagtcactgtgttcacaatgtgatggccttgagttaccaaagattgctgcttatggtactcagtttaagaaggcaggtttatgtgtagcatttcagaaagacttttatttagcatggttaatttttttgttaatttcatattttgaagtaatttcaaacttaaatcagttgggtctcaaaaaaaaatcagttggaataatacgaagaactctcctatatcctttatctaagttattaacatttttcagcttttgctttatcattcacacacacacccatctatgcatacattttttttttggtaggaatgccacagaggtgataccgtatcttactcagtgcatctatcaggagacacatgctggtttgacctattacaagttgatttttaagatcacttggttaaggtggagtctgccaggtttctcaatgctaaggttaatatttttacctttgtaattaatttgtgctttcaaggaatatgctttgagactgtgtaaatatcctgtttctcatcaaacttttatccactagttttaatatctattgatgattctttcctcagtcagttattactacaatggttgccaaatggtgattaacattctattgtaaggaaggttttccttctctcttatttatttattaatttatttttagatcagtgtggactaatggattcttttttttccatgactgtaatccattagtaggggtattatgatgctcgtattgtcttagatttgcctcatgggtgggagctccttcaagctggctcctttgtccctctggtatgtccccaccattctttgagcacctcctttcttcttggcatactaatatatgctgagctcaatttgtattctgtgccagccctggaatcagccatttcttcaaggaaccctggagaatggtatttaggaactaggatccgggttctcagagtgttcattgctgctattatgtcattgctttcgtagccaatagtatcaggaaatagatgtatgtatgtgtgtgtatgtgtttgttgtgtacatacatatacacatacatacgtgcatatatatgcacaacaaattgcacagatacacctgtctctatgtctgtgaaaaccatgaatttggcttccagcaaaggcagattaacatttacccttccatgtgaaacaatgaaaacaatgacaaaacatatgaagcaatggttttcagacaccaaagggcagtgatctcttgagagatgggaaacaaatgaactgagctctccagttgccctgccctactgccttgagagaattttcgtgctgtaacagaaagagggagaacccagatgggagtccaggcagaccctctgttgaaaaggcagagctgagcatcaggggaggccagggtggctggcattcacatgcaagagacgatagcggagacagctctgcacagggagagaaccccacaggtctgcagagtctccactggcactcagctgaatactgaccagcacattgtgcaagaaaactacttaaggtcagtgaaaaggcctttcctctttaacttttcgaattagaggaaacatgtctggtgctcacccatggccagggatagtgcctgttcccaccagctaagactggaaaaatatttcatggggcattgggtatgatacagagtagggggtcttgcctctgtagtagggaatgatcagccttagagtgagcactgcttcagccctacctgagtgtttacaggaatatacaaatacccaacatccaacaagatgaaattcacaatgtctggaacccaatcaaaaattactggctgggtgtggtggctcagcctgtaatcccagtgctttgagaggctgaggtgggttgattgcttgagcctaggagttcaaaaccagcctgggcaacatagtgagatcctatctctacaaaaaataaaaaaaaaaatagccgggtgtggtagcatacacctgtggtcccagctacttgcgaggctgagctgggaggattgctcgagcctgggaggttgaggctgtggtgagctgtgatcatgccactgcactccagcctgggcagcagagcgagaccccatgtcaaaaaataataaaatgtataacccaattttttaaatggacaaataatttgaacagacttcaccaagaaagatatgtagatggcaaataaatatatgaaacttgttaatattattagttattagggaaatgccaattagaaccataacgagataccactatacaccctctagaatggctaaaatgaaagaagactgaccatactaagtgttggtaaagatgtgaagcagttgggtctcatacacgcctggtgggaatgtaaaatggcacaatcactttggaaaacagtttggcagttgcatgcgctttccttgtgatatagctttttcagtcctgggtgtgtatttgcccaagagaaatggaaaaatatgtccatacgaaggcttgtacatgaatattcgtagcagctttattagtaatagccaaaaatgtagaaatcaaatgtctaccaacaagtaaatagttaaactaaccatggcatatccatatgatcaaatactagtcgacaggtggggcttggctcacgcctgtaatcccagcactttgggaggccgaggtgggtgaatcacctgaggtcaggagttcgagaccaacctggacaacatggtgaaactccatctctacaaaaatacaaaaattaggcatgatggtgggtgtctggaatcccagctacttgggaagctgagcgggagaatcgcttgaacctgggaagtggaggttgcagtgagccgagatcacaccattgtactcctgcctgtgcgacagagcaagactccgtctcaaaaaatatatatactaatcaacaataaaaggaagtagagtattgatacatgctacagcatggatgactttcggactagtaagattagtacatactctgatgccgtttgcataaaattctagaaaacacacagtcatgacagaaattggattggttgtctgggcatggggtatttgacggtgggattacaaagggacatgagttttgcaggtgacggctatgttcattgtcttgattgtagtgatagtttcatggtatgtacataatgtcacaacttaccaaatactgtactttagcagttattgcatatcagttacactctaataagctccaaaaagcaaaataagatgagggaatactgttgtctccaatttcatttcagcaccctagggccctttccatgtttgtagcttccttcttcaagaccttcattcacaacgtactgagttacttgtcaatcctaggatacatggtagctttttacaatttctgacctgaactatggcaagaaacagttatactaactagaattcaatatttgtttttatttatactaactaaagttcaatatttgtttttatttctttttgtctttagtctaagtttttggtcaaaacactacttgagtcaaaaataacttagttcttttttctcacccttcatcatattttcagtgtgtgctatcagtttaaaatacagttaggttaatttatttgtttgtattccactttagggtttcctcccatccttgttgactctatgttatcttctgagtagtaacacattaacatagtaacaaaagacaaaatatgcaaaaaggaataccagagtagtgtcatcccccaccctgtccccaccccttccttaccttaccagtctcatgagtttctggcatttccttcatgtgtttctgtgttagtctgttttcacactgctgataaagacataccagagactgggcaatttacaaaagaaagaggtttaattgacttacaattccacatgactggggaggctttacaatcatgcaaggaggagcaagtaacatctttcatggatagcagcaggcaaagagcttgtgcagagaaattcccatttttaaaaccatcagatctcatataagactcattcactagtacaagaacagcacaggaaagacccaaccccataattcagtcacctcccaccagattcctcccatgacatgtgggaattgtgggagttacaattcaagatgagatttggctgggacatagccaaaccatatctttccacctctggcccctcccatatctcatatcttcacattttaaaaccaatcatgccttcccaacagtcccctaaagtctcaactcatttcagcattaactcaaaagtccacagtccagagtctcatccaagaccaggcaagtctcttctgcctatgagcctgtaaaatcaaaagcaagttagttacttcctagatacaatagrgttacaggcattgggtaagtacagccattccaaatgggagaaattgaccaaaacaaaggggctataggccccacacaagtctgaagtccagcagggcagtcaaatcttaaagctccaaaatgatctcctttgactccttgtctcgcatccaggtcacgctgatgcaagaggtgggttcctatggtcttgggcagctctgcccctttggctttgcagggtatagcccccctcctggctgctttcatgggtggcattgagtgtctgcagcctttccaggtgcatggtgcaagctgtcagtggatctactgttctggggtctggaggaccgtggccctcttctcatagctccactaggtggtgccccagtagggactctgtgtggggactccaacccaacattttccttctgcactgccctaggagagattctccatgagaaccctgcccctgcagcaaacttctgcctgggcatctaggagtttccatacatcttttgaaatctaggcagaagttcccaaacctcagttattgacttctgtgcaccctcaggctcaacactgtgtggaagctcccaaggcttggggcttgcaccatctgaagccacagcctgagctctttgttggcccctttcagccacagctggagtggctgggacacagtacaccaagtccccaggctgcacacagcatggggaccatgggccaggcccgtgaaaccactttttccccctgggcctctgggcctgtgatgggaggggttgccatgaaggtctctgayatgccctgcagacattttcctcattgtcttggggattaacatttggctcctcgttacgtaatgcaaatttctgcagccagcttgaatttctcttgagaaaatggggttttctttcctatcacattgtaaggctgcaaattgtccaaacttttatgcactgcttcccttataaaactgaatgcctttaacaacacccatgtcacctgttgaatgctttgctgcttagaaatttcttccgccagataccctaaatcatctctctcaagttcaaagttccacagatctctagggcaggggcaaaatgccgcctgtctctttgctaaaacataacaagagtcacctttgctccaattcccaacaagttcctcatctccrtctgagaccacctcagtttggaccttactgttcatatcactatcaacatttttgtcaaagctattcaagaagtctctaggaagttgcaaaccttcccacattttcctctcgtcttctgagccctccaaactgttcccatctctacctgttacccagttccaaagttgcttccacattttgggatatcttttcaggagcgcacctccccactggtaccagttgcctttattagtgcatttttatgctgctgataaagacattacccaagactgggcaatttacaaaagaaagaggtttaatcaacttacarttctgtgtggctgtggaggcctcacagtcatgtcagaaggcaaggaggagcaagtcacatcttacatggacggcagcaggcaaagagagcttatgcaggaaaactcccatttttaaaaccatgagatctcatgaaactcattcactcatgagaacagtgtaggaaagactcatcttcataattaatcacctcccactgggttcctcccatgtcacgtgggaattgtgggagttacaattcaagatgagatttgggtggggacacagctgaactatatgtttcttttgtagaaataagcaggcacatgtataattttatattcccttattctcttacacaaaaggttgtatactatattatcttctgttcctttttttaaaaaaacttcatatatcctgacagccactgcagtattaattaacagagagctattcctcctttagcaatttttattgctagagtgctctgctatgttgacccaaaacctgaaatctaaaatgctctaaaatccaaaactttttgtgcactgacatgatgccagatgtggaaaattccacacctgacttcatgtgatgggtcacagtcaaaacacaattaacactttgtttcctgcacaaaattgataaacgtattatattaaaattaccttcaggctatgtgtgtaaggtgtatgttaaaaatatatacattttgtgtttagacttggggcccatccccaagatgtctcattaggtatatgcaattattccaaaatctgaaaaaggcaaaatctgaagcacttctggtcccaagaattttgggtaagagatattcaacctgtaccacagtttatccacatatgaggatttagattttttatagcttcttttagccacagtgctgcactaaataatcctgtgcttatacaagaggaattgctagatcaaaaggtaaacacatatgtaagtttgttttgtttgtttgtttgaataatgcccaactcccttttgtaaggtttagatcaatttgaattgtcacgagcagttgttgcccagaggcttgtcaagagtgtggtgttacacttttaatttttcccaatctgataggtgagaaaggatatcttaagttttaatttccagttattttctttgagtgaaattgaactttttataggaccatttatatttaaaaaatttttctttctgtgaacttgtctgttcatgtcttttgtccattttctaaatcaggtttttggtccctttttccccttggttttaaagagttctttatatattagggatgttagcttttcatttttcatatatgttacaagtatttcctcattgrttgtcctttattatgatttttttcctatgaaacaggtttttttttaaaaaaattgtcagtcttttattaattggaattgtagttctaagccttttctacatatagatcatatgataattcgccatgttttcttgtactacttgtatggttttgctttttacattcagatttctgatccatttggagtatgaggtgtggattttatcttggttcaaagataaaatgccccaacgtttgtgccccaacgtttgtagcatcatttatttcaaataagtttttctcagtgattagagatgcctttatcatgtagtacatttccaaatgcagttcaakctatttctattttctggtcaatctcctgttgtgtctcttctttcctcagcaccaaactgttgtaattggagcgtgttttattgtccaatagggtgttactttgccttttcagtgttttctgatctgttcatgaaggtttattgttctgtatgaactttagtgtcagtttgtctagcttcataagaaaggttgacatttttattgagattacattaaacatataaattaactcagggaaaatggttattgagtcattctactcaaatgcaagggatgtctttctgtttgtttaagtctgatagtctatcttcccaggagtgttttcatgtcttctccatataggctttacacattgcttgggtttattcctragtgtttggtcttttctgttactgtaaatagaattttcccaccattatatttttagctggctattgtttgtaaataggaaggttataggtttctgtgtgtgaattttatattttttatgttgcttgaattatcttactattttttatcattgattctctagggttttctaagtgtactatcactttgtttttgtctactacagtactgtacttatacagaggagaaaagtgtctttcttgcatacagagtgaaatatcactttgctatttcttttcttgctagttggcgtgcacagtgtcatgaagcacgatgccatcatggatggagccagcccagattatgtactggtggaggcagaagccaaccgagtggcccaggatgccctgaaagcactgaggctctctcgtcagcggtgtctgggagcagtgtctggtgttcccacctggactggccacagggggatttctggtgcaccagcaggaaaaaagtaagagattgctgcatgccatacttgcaaggagtccaaacaactaaggctagaaataaaatcagggcaggtgtggaggcttatactgytatttctcttcaggaataaatccccagggagggattatagcagcaaaatctgggtgacttggagaaatactgttataactttgccttcctccttgctttcatcccctgttttccaaagtggcttcaggagaagtgattgrttttatytgagagatggtgttgttaaaaatagtaagagatacaggataatgattaaaccttaatgagataattagccagtttacagcacacattaattactttgctattcagtatgctcttttagaatgattttcctacttggaattgagaatggttcccatcatcttttgaacaagatactgagtggttctcattctgagatgcagcagttcctttttttttttctttttttagagatggagtctcgccctttcgcccgggctggagtgcagtggtgtgatcttggcccactgcattctctgcttcctgagtagctgggattacaggctcccgccaccatgccaggctaatttttgtatttttagtagagacgggatttcaccatgttggccaggctagtctcgacctcctgacctcaagtgatctgcctgcctcagcctcccaaagtgttgggattacaggcatgagccactgcgcccagccagcagttactttctaggagggtggagtggaagaatcgagggggatagagcagaaatggcatggctgtgaaagaataagcatgcagatggaaatgtttccaggaagaagttcattgttgaaagaatattttgatctctaagtctcaaaagcaaacatttaatctactgtgatgcttttccttttttaggagtagatttggtaagaaaaggaattctaacttctctgtgcagcatccttcatcaacatctccaacagagaagtgccaggtaatatagataacctttttgctttccagggtgagacttgcttgattgaatgctgtgaaaatttcacctgattctggatgtgaagaaaatggtcatctctggtgtaatgacacctgatatttgtgttgcacgctctgatttacgatgcacattcacttgaatctaaaaggacctgctgatttcctaaagacaaagtctttaacccaagatccgtagcagcatttctgttttgccattagaaggttgacacagggataggtgtgtcgctgctaggacagcctgccttgtctagagggaaagtgccagctccagagaccacaaccctctgaaataaaagtccagaaaactgccttgaatgttggtgtctgtaactcactggctgctagagcagagtgcctgtctttctctgctcaagaatgccctgcttgccttgagtgctactgtggttaaaactagtccagattccaccattcagtggaagtctttctggtctttctgattaaggattatgttaaaactcccagattcagactccaattttaagttaatgtgaacatgtttaggaatactagtacctttttgacttcccatgttctgtgcttttagcagtagggatttgagaccctttcagagttagatttgtgtttttttaaggcaagttgcattagatgtaaggtaggaaagagtaagaagacttaaaagtgaagaaaaggaagtatagctatgatattgttccttatccacagtgtacagggtccatttgagaggaagaacaggaaaagcccacaggtactgaaagtggtcctgggcctcctagagacagattttcctgaaaccttgcctggaagcctccactctgccttcctgtccaccaccatgttgagtggtggtgactaagggaatggcttggttgccccctctttatttttttttaggaaacggtctcttaacagtgggaggatttagataccagaccctcctcctttcccttttcattaggtggagtctcagtctcaccctgtcaacctcaccaccctggcacatgtgttgtcttgtgacccttcacagcctttggggaaggaagtgggggcataaactagaaattaaatatatcagtatagtggtcttctttttataggatggcatcatgaaaaaggagggaaaagataatgtccctgagcattttagtrgaagagcagaagatgcagactcttcatccgggcccctcgcttcctcctcactcttggctaaaatgagagctagaaaccacctgattctgccagagcgtttagaaagtgaaagcgggcacctgcrggaagcttctgccctgctgcccaccacagaacacgatgaccttctggtggagatgagaaacttcatcgctttccaggcccacaytgatggccaggccagcaccagggagatactgcaggagtttgaatccaagttatctgcatcacagtcttgtgtcttccgagaactattgagaaatctgtgcactttccatagaacttctggtggtgaaggaatttggaaactcaagccagaatactgctaaacaacattgcttcctaaactttcaagtccctttttctaacgggcatttctgaytattaatttattattaataatcatgtttgtcaatggaagttggctgcacttgatgtttgtttgcatgatgtctacctcagaattaaaactttaaggaagaagaaactcttctctgaaagttaaaagttttaataatgctagctaaaggagaaaatacttggattgatttttttttttttggcaatctaattatattgtaaatcaggtacctaacagttactccttggagcacatttgttcctttacccaaaagatgctgtcagggagcacagttagaagtttgcagaacagaaatctcaatatttttttttattggtgctaaaaasaggtcttacattcagtcagacctgttcaataagttcatcaatatctgataacagcattattttgatgcttaaactttaaacatttatatttaccatttgccacccacaaaggtcaggtttgttatttgttgtttgataattatattaattttcttggaaagatcctcttttcaaggtactggtaaattggtgagtatttttattagtaaagcatgaaatagtatggtaataaatgataagacatgtatttgtggaaagctgtagggtattcagtttaccctggctttcctttaagcagagggcatctttttctctcctacagtcacaaaatgtgttatcattaaaaaaaatcaaattaaagccaaaagtaggtacataaaaaccacacacatgcatgcacacaaacatcactgcagcccacagcagacccagccgttgttaccatgaagtgacaccactccaggcctctcttgtctgcaggctggcaggctgtcttctctccagttgccttcgtcttgcgcctgcctttgcattccttgcgacgggctttcttrtttctgcggtttggattccagccaaggctgtttgtatctcactactgtttatgtgtttgtggttctgtgatggtgttgctttgatcctcagtttattttcttacccatgtttttcttgtttccttctcaggatgattttatcatctcatctttgaagtgttgttttccgaaattcatcgtattcctgaaatttcttcttagctgtcttagtgcagtttgtttcttggatttgtattctctggcatgctcttttcctctctctcatttttctgtagtatgcctgccctcctaccctgctatttctttacatctctctcatgcttaacatggatagctgtgtccagatcttctgtctgctcatccatgtgactcagagaggagggttctgggcaggggggccttgccggactgcatgagaggacatgagttttgctttctctgctctaatattttgcttaagccaagaatccttttcttagagatgttctatatgattcctgtcaggattttctagttttttttggattatagcttgttcatttcttttgtttttagtttggtttatatataatgagggaagaagatgattacattatttttgtcactttgccatcattgtttagaagtcatagaaagaatttttaaataggccaataagtcttaaacttgagtacttggcttagaagaaagtcaaaactccttcctttttgactaagtggtttgtttctggggagctcttaatttctatttttataatcattagcctataaggaaattgtgtcttccttgttctcagggtgatctgctgaccttgttcactcatgaagcatttgggtatcatacttatagtgtctgaaacataaactgtattgagctagacaaggtatagcctcctcttcaagtagcaaatactatcaaaagctataatgcagtaggagcaaggtggtccttgttccagtttttgtctcagttctgctgctgatgtaccatgatcttgggaaggtggtgtctcagtgtggagatctgacacattgttaccgtgcctcctggctggagggacttggagaacaatgcagttaagtagaatggttttaacaatacagagaaatttattcatttagataaaaatctgatttttagaactttaaaagctttgtacagtgtaaatagatttaatgtatttaacatgctttatcagcacaaataaaggattttaaaattttgtcaaaaaattaaatgttaatactatcaccattaaaaatgttcaagcaatagtctgcctccccacccccacaccatcttgcacctgttccacagctaagtacagccctaggtttggtgtgtattctccatgcatttagagaatcacatgacacagactgctgctataatgtcattttcccattcttcctttactaataaaatttttgagttttacctggacgtctggctgctcagcttaagactacttctcagcctctcttatagttaattgtggccatatgactaagttttaaacttcccaattggccctttaaagaagcagggtatgcactctccttgacattcccctttcttgctggctgggaggccaatgggagcttcagtagtgacctggcatctcaagagatggaagtgatgtgttgaggaaggagaagttggcctgccagtcttgaactgctctcctttgacctgttatttaagagtaaaataaaatactgacttgcttaagctactgtcttttgamgtctattatagcaattagtttgctttaaatatgtaatttatattaatggccttataccatccttattttgcaactaacttttcatttaatattatatgcaagacatttctattcctgtaagtatagctctgcctgcacagaattgttggattaatgatgtagattttaaatgtcagtggatgtagcagaattgcttgcatcaattcaccctccataaaaggacccatttctccaaacccttgccaacagtaagtggtatcaatatcgataggttgttttgttttgttttaaccagtctcgtgattgaaagtaccttgttttcacttgaatttccctgattacgtacaaaatcaaacatttccatgtttattggccatttgtagatctctaccgtacattgcctattagtgttatgttggcctagttttcctgtgggttgtttatcttttaggattgctcccctaaacaaaaacaaaaaggcagttattccaatgatcaacaaatattcttttctccaccagtttaaaatgtcagctttcaactcatcacatgctaagttgtctatttctgtcctgtggatccaggtgttggttctaccaaccacactcctcacgctgtcatttggtgctttgcattgtgttttgccattcatgggcaagttccttttcctttctccccctcttcagtgtcttatacttgggtgttttctgttccagctgaatcaagaattagtttattaaattccagtaaaattgtggtgttcttttgactaggattgcatttgtttacacattaatttgagaataatagacctctttataattaatataatgtttctgattagtgttatgataggcctcattttattaaagtcttttatattcttggatgaaattttaataactttcttcataaatgtcttgcacatttcataataggcttattcctaggtgttttatagatttttagttttggttgtgagtcttttaacttacataaaaatatggagaattagcatattcacatatctattttgtgatgtttatcatacggaagttttaaaatatagtaaattcagtctttccatttttttttgtttatttaagaaccattccctagctagggtcatgaatacattcttatgaattattaatcccatatggatagctagtttccctagcacctttaaaaaatagtttattattttcctcctgatgtataaggccacctttaccaatttacatataatgtacggaaatgtttcttggctctgcattctgttaaattggtccatttatctaactttgcttagtaacccactgtttttatcattgtggtatcataattgattatcacaaatggtagaatgattgtcctcaaagtcttttctggtatatattgatataattgtatagcttttcttggtgtagtaaagtacacagttaaattttctaacattgaaatatcttttagattttcacttccagaatggcaatgtgaagggccctgtggacccactgtcctaggaattagctataactagtgaaaattgtaacaaaaaataaacaccttcctctcatacagagagacacaaacacttaatgccactggaaattgtcctaaaagcatgtagaataaagtaacgcttattcaagaaaatccaaatcttggtaagaacagtgagtcagacatttcagccacaacacactcactccctccctcccatttcagtgggtgcagccaagaaaacagagctccatctccctcagctccctgtccagaggtatggtacctcacagggaggggcaagatgccagcatttcttatcccctccagcttcaagtggcaagagctaaattcatgaagttaaaaactataataaggaaaaaatgcactaaaggggttcaatagtagatttgaactggcagaagaaattgtcagccaactggcagatagaataagagagatatgctttccaaagaacagagagaaaaaaaaatgaaaaatgagcaaaacctcagagaaatgtgaagcaccattatgtgcaccattaagtatgcatgtaatgggagtacaagaagagcagaagaaaaaggaaatatttaaagatacaatgactgaaaactctccaaattgattgaaaaacatctaggaagcttagtgaacttccagcatgataaatgcagagggattcacagacacatcatagtcaaaaatgctgaaatcaaagatgagaaaaccttgaaagtagtgagtgaaaaaaagatacatcacttagagaacaaaattaatacttgacttctcaaaagaaataatggaggccagaaggcaggtataacagtcaaagtgcttgaagaaaaaaaactgtcaaccaagaatcctatatccagcaaatgtattattcaaaaatataagtgaaatactttcccagataaacaaaaacagaaaaattgttgttaaccaacctgcctaataagaagtattaaatgaagttctttaggctgaaagcaagagaagagcaccagtaaaagcaattatataattataaaagtcacataaatgcatatttttctcctcttaactgattaaaatgcaactgtatcaaataatacgtatatgatgtattggtctataacatacagaaatgtcatatatgtaacatttgtcaaaacagcacaaaggaggtggctgggagcaaagctgtagtagactaattaaatgatggcagatggtaaagtaataattataacaatgtgttggatttgtaacattaatagataccatatgtatacctaaaatatcacaaaaaggggsaaagggaatatagctatataagagtaaagcttctatatattattggagttaagcttgtgtaattctaacagattctgataagatgtatatggtaaacactagagcaaccactaataaaataactccagaaatatagttgaaaaatcattaatcaaattaaaatactaccttagaaaatactcgatgcaaaaggcaatattaaaagagaatgaaaagaacacaatggatactagaaaacaaaaagtaatgtgtattcaacttatcaataataaatgttaatgaatttaatcaggcagagactatcagattggattaaaaatacattccaactctatgttatctatgctcccatagataacacactttaggctcaaagacacagatagattaaaaggatacaaaaagaaatagtgcaaacaattgccataagaaagctggactggctatactagtgtcagacaaagtagactttaagacaaaaatgctcctagagatagagacattttataatgataaaaaggttaacccatcaaaaagatataacacttgtaaacatatgtatgaacttaacagtatcaaaacacagaaagcaaaaactgacagaaatggaagaagaaaatggtcacaataataattggagactccataacctattttcagtaatggacaaaactagacacaaggttaacaatgaaatagaaaacttgaccaacgctgtaaaccaactagccctaacagacatctatagaacacttcacccaagcgctacagcatatacattatcaaatgctcatagaacattcttcaggataggccttatgctagaccatgaaacttcaatacgtttaaaaggataggaataatgcaaagtgcattttgtgaacataatcacaggattaaattagaaataaaaaatgggaacatttgaagaactcacaattaggaaattgaacaacacactactaaatgaccaatagaccaaagaagaaaacaagaaggtaatcagcactttgaggctaatgaaaattaagacacaagtaaactgtacggatgcagctaaaaaagtgcttagaggaaatttataggtgtaaatgcctgtattaaggaagaaataaagcaataacctttcttccaccttaagtcactgaagaaagaagaacaaactaaacctaaagcaagcagaaggaaggaaataataaaattagagtagaaattaatgaaagaatagaaaaacaatagagaaaatattactagaaactggtaatttgaaaagatcaataaatatgacaaatatttcactaggttgaccaataaaaaggcaatactcaaattactaggatctgatatgaaagagtagacactactaccaaccttacagaaatgggcaatctgaatagacctataactagtgaacagattaaaccaggaatcagaaaattgcccacaaagaatagtccaggcacagacagttttaccactgtgttctaccaaacaatcaaataaattatagcaattattctcaaactctttcaagaaataggagggagtacttcccagtattgccctgataacaaaactgctcaaagatattacaagaaaactgcagaccaatatgtcttatgaaatacctgcaaaaatcctcaactaaatgctgcaaaccaaatccagcaacatataaaaataattatgcaccatcaccaagtaggatttatcccagggatataagattggcttaacatgtgaaaatcaatgtaatacattatatcaatataataaaaaagtcatctctactgatgcaaaaatagctgcatttgaataaatccaacaccctttcatcataaaaatgtttgaaaaacgaggaacggaaggaaactaccttaacctgataaagaacatctatgaaaaatctacagctttctttatacttaatggtgaaaaactgaatgctttcccactgagattagaaataagacaaggatgcccattatcacacttctatttaacattgtactggagggtctaagccattgcaattatgcaagaagaaaataaaggttggaaaggaagaagaaagactgttcacaaatgacatgatcttgtatgtagaagattctagggaatccaccaaaaaaaaaaaaaaaaaactattgaaactaataagtgagttcagcaagatgggaggatacaacatcagtatttaaaaatcagttgggccgggcatggtggctcacgcctgtaatcccagcactttgggaggccgaggcaggtggatcatgaggtcaggagatcaagaccatcctggctaacacggtgaaaccctgtctccactaaaaatacaaaaaattagccaggcgtggtggcgggtgcctgtagtcccagctacttgggaggctgaggcaggagaatggcatgaacctgggaggcggagcttgcagtgagccaagattgtgccaccgcactccagcctgggtgacaaagcgagactccatctcaaaaaaaaaaaatcgtatttctacacacttgcaatgaataatcaaaaatgaaattaagaatattcataatagcatcaaaaagaataaggtgcttaataacatatttaacaaaaagtgcaaaacttacactctgaaaactacaaaacattgcagaaagtaattaaagaagacctaaataaatggaaaaacatcccatgttcatggatcagaagagttaatgctgttaagatgacaatattcctcaaacttgtctgcagattcagcataatccctgtcagaatctctgctgacatctttgcagaaattgacaagctgatgctaagagttatatgaaattgcaagggacccagaatagccaaagaaatcctgaaaaagaataaagtagaaaaacccacatttcttcattttgaattacaaaacaatagtaattaagaagtgtgttactggcacaagggtagacatagatcattgtattttttaaaaaatggtgattccagaaataaatgcaaacatctgtagtcaactgattttcagtaaaggtgccaagtccattcagtggggaaagaacagtcttttcaacaaatggtgctgggacaagtggatagtcacgtgcaaaagaatgaagttggacacttaccttacattatatttaaaaagttggctgggtatgacggcccatgcctgtagtcttagcactttgggaggcaaaggggcagattgcttgagtccaggagtttcagaccagcctgggcaacatggcaaagtcatgtctctacagaaaaaacaagttagctggtcatggtcatgtgcatctgtagtcccagctactcaggaggctatggtgagaggatcacttgagcccaggaggtcaaggttgtagtgatccatgagcatgccactgtactccagcctgggtgacagagcaagaccctatctcaaaaaaaagaaaaaagaaaacaagttaaaatagatgaaagaggccaggcgcggtggctcacgcctgtaatcctaacactttgggaggctgaggtgggcagatcataaggtcaggagtttgagagcagcctggtcaatatggtgaaaccctgtctctactaaaaatacaaaaattagctgggcgtggtggcgtgcacctgtagtcccagctacttgggaggctgaggcagaaggatcacttgaacccaggagccgagattgtgccactgcgttccagcctgggtgacagagtgagactctgtctcaaaaaaaaaaaaaaaaaaaaaaagacctaactatcaaagcaaaacctataaaactcttagaagaaaatgggtaaatcttcatgaacttgggcttggcaagcattctaagatatgacattaaaaacacaagcagcaaaagaagagaatttggacttcattgaaatttaaagcttttgtgctttgaaggataccatcaagaaagggaaaagacaacctacagaattg

SEQ ID NO: 95571 - DNA, 40318 bp, Homo sapiens
  misc_feature (1)...(40318): n = A,T,C or G
agggatgcgtggccttcagcccgagggcaagcgatggcctggatgctgtttcctgaagtccaaaatcttggctgtgctctccttgggggttcgctccgagaggtgggaggcctcagttgctgcaggggaggcggcagcagaggtttaaggggctgaatttgcctctgaatcctgccgcctccaaacggaaactcgagtccctgctgtctccatgtcctgtcccacctggactggggctggtggaaaggccggctgcaatggagctggaggacaggagcagatggttgccctaggggctccatctttcagggaggaaaaccatgggtattctggaggttgtggcccaaaggccaaggctgggagcagaagaggcctgtgggaggcagtggtggaagcgcagagcttgtcagagggcagccttgtggagaagctgaccagccgggcctaggatcaacacctgctgtatcacaggcttatcagaggaggcgccttctgcacttcggggcacccacagaagatttttagtatgatgcaggtcttggatcaacttgatattcttaaggtggtaaaattcccctttcaaaggtttctttgtcagataatgaaatgttctaaaattgcacagtcggttgcacaactctatggatatgcttaaaaaagaattgaatgatatattatatacgggtgaattgtatggtatgtgaattatatctccataaagctgaacccagtaacagacccgcacaaatgtgctcaactgattttttgacaaaagtgcaaaagcaattcaatgggggaagaacagcctttcaacaaatggtactggggcaatggaccgtccataggttaaaaaaaagaatttcagcctaaatctcacattttatacaaaaattaaaggataatgaaccaaaatgcaaaatgtaaaacaataaaacttctagaaaaataggagaaaatcttcaggatctagggtgaggtgaaaaaaaatctcagactaaacaccaaaaacatgagccataaaatgaaaaaatgatatattggatttcatcagaattacaaatttttgctcagtgcacaaccctactaagaggatgaacagacaagctacaggccgagagaaaatatttgcaaatcacgtatctgacaaagtctagcatctagactatgcaaagagctctcaaactcaacagtaagaaaaaaaaagagtgatccaattagaaaaggtctaaaggacataaagagacatttctccaaagaggatatacagattacaaacacacacgtgaaaagatgctcattagccatcagggaaatgcaaattaaaaccgcaataagatatcatgacatacctatcaggatgggtaacacacagcaccaaatgccggtgaggatgcagagaaactgtatcacctacacattgttgatgggactgtgaagtggcacatctactctagaaaagagcagaaggtttataaaaaatgaaacatgcaactaccatacgacccagcaattgcactccaaggcatttaccccagagaaatgaagacttatgttcacacaaaaatctgaacataaatgtccatagcaggtttatttgtaatagccaaaatctgagcacaatccagatgccctttatgagtgaatggttaaacaaactgtggtacatccataccatggaatactactcagcaataaaaagagacaaatgactgattcacacaacaacctgcatgaatctccgaagaactatactgaatgaaaaaaagctaatcctaaaagcctacctaccctataatgccacttacatataacattattgaatgcaaaattatagagatggagaactgattaatggtttggaggggttaaggaggaggtgatgtgggagggaaataggtgtggctatagaagggcattttgagggatccttgtggtgatagaaatgttttatatagtagtttgtgcttatcctggggagatacgttccaaggcccccatggatgcccaaatcctcacatagtatcaaaccctatatataccctgttttttcctatacatacctatgataatttttttttctttttctttttcttttttttttttttgagatggagtctcactctgttgcccaggctgaaatgcagtggcactctttcagctcactgcaacctccacctcctgggttcaagtgattctcctgcctcagcctcccgagtaactgggattgtaggcaaccatcaccacacccggctaattttttgtatatttagtagagatggggtttcactatgttggccaggcttgtctcaaactcctgacctcaggtgatccacttgctttggcctcccaaagtgctgggattacaggtgtgagccaccatgcctggcccatacctatgataaagtttaatttataaattaggcctagtaagagattaacaacaataagtaagactataaaagaaaaattataataatagactgtaatcaaagctatgaaaatgtggccaaagcatctataaacaaagttaagacaagtgacagactgggagaaatgttgcaacatttacaacctacaaaatattcttattcagaatatgtacagagtttatgtgaattcaagcaaaatataaacaacctgatagaaaaatgagcaaagtctatcaataggcaatttgtagaaaaagaatacaaaataagaaacatataaaaagaaacatataaaaacatataaaaagattttcaggccgggtgcggtggttcatgcctataatcccagcactttgggaggccaaggcgggcagatcacttgaggtcaggagttcaagaccagcctagtcaacatgatgaaaccctgtctttactaaaaatacaaaaattagctgggcatggtggtgtgtgcctatagtcccagctacttggaaagctgaggcaggagaatagcttgaatccaggaggcagagtttgcagtgagccaagatcacgccatcgcattccagcctaggtgacagagcgagactccacctcaaaaaaagagagattttcaaactcgcttatcagttttatgctaactaaaacaaaatgtgatttttcacctatcagactggcataaatgaaagaaaactgataataaatcttggcaaggatgtaagggagtgggaactcaaaaacactaatgaggaagtattcagtggaacggtcttactagatatttattatacatattaaactgcaaagaatatatatcttttgacccattgttaaacttaatttagaaatcaggctgggcatggtggctcactcccataatcccagcacttgggaggccaaggtgggggatgatgaggtcaggagttcaagaccagcctggccaacatgatgaaactccatctctactaaaaataaaaaaattagcgaggcatggtggtgggagcctgtaatcccagctactcaggaggctgaggcagaagaattgcttgaacctgggaggtggaggttgcagtgagctgagatccagccactgcactctagccttggtgacagagcaagactccatcttgaaaaaaaaaaaaaaaagaaaaaaagaaagaaagaaagaaagaaagagaaatcaatgttaccatagtagttttgcatgtactaaagggaatatataggaggactcttttctccttttttttctgtaaatgtcaaaagaaatggaaatgttcattcaatgggagagaagtgacatacagtcaccatacatccctataatgaatacaacatacccatgaaaaagaatgaggtggtcctacacatactgagtttaaataaaaatcttcaagacaagggaaaaaaagaaacaagtcgtggaactatattctagtgtgatccatttcatatttttatgtatatgtttgtagaagcatatggatataaatacataaacaattttgtaaaaatgtttgccaaactggccagtagttatctctggaaggaaaaaaaagaggtgaggttggggcaggtggaagggggcttttcacattttgttctgtatccttctgtatcatttaagttctgtacaactagaataaataaaaacttccatgttctgacacacacacacacacacacacacacacacacacacacacgccacaggcatgggaaaaaaagaaaggtgtctgtttctgaagatctctgcaaagcctacagccactgccactaatcctctcaggcttctgagaatggcagccaccctcatgggagcgttgattgccccaaatgtttgctttaatcaatgcaattagcagaacaccaattaggctggaaggctgaaaggctctgaagccttttgatttgcaagagccttgttcctgcctgctgctctgtgtcaggctttccatctttcttaatcggtgactctgacttgtaaacttttccactattaccccaaactgcagcttctccttttccctagctcactgagaagttccactgtgcccaagtcactaaagccagacacctgtgagttatctatgtctccaccctcatatctggtcaaccactaaaccccgtggagctgatccccgtaagtctctcaaatctggccaccttactccgtctctactgcaagtacattactgcctctcacccggaatttgaattttgaaaaacagaagagccttgaagagacagttcctctatggctcagccctgcttcctgaagtaaattttcagctttcctctgattctgtgagttgccttatatacaaccttcatatcaactcgttttcggctgaagctagccaggtcatttttggtgcttgtgtccaaagaattcccaatgaaccctgcccttctgcaccagataaaatcttactcatccttcaggatccaagtcaagtgtccatttactcactcagtcattcattcaacaaatatttactgaaaaataccatgatagtgctgtgttaagtgctgaagattcttgaccacatgtatccctaactgtctccaaataaagaacttttgggagacttcaggtgcagaagttagttgtattcctttcttcgtggcactctgtcagcagtgatctgggtaattgattaattacctcatatccacattccccatcctcctccctcgacaagcaaccatattaattggtttgatatgtacttgaatatattcttgtgaagtgcatactgtagttttgagattaaaattcaagagtgtaagtgtagaagcagagaagccagttaggaggctgctgcgataatccaggagagatttgatggcaacttgaaccacaggtatgttatgttcctatacaagaaatccctgcatttaaatgagaacaaaacccaacagaaagctgaaaaaaatacaacagaaaaccccaaactaacaaacaacgggagatgcaaatggttgataaccagagaaatgcagattaaaacaataacaggacattgcatctgctattctgataataattagaaagttgatctctatcccagagaaagttccacgcaggatcctaagggaatgtgtatgaagaagttcattgcagccttgtttgtggccacggggtggtgaggacagcctgggtcaccatcagtgggaggatgaatgggtaaaatgtgtatcagatttggggtaagcacttttcacgcattatctcatctttttttcaaaacatccctaagatagtggaacttttcatagcattcccattttacagacgacaaaacaaaacctatcctctcctacacacaaaggctgcttgtcgtctggtacattcgtcctagttttaggacgagcacacggggttcagggcctcagccccgttctgcggtctcagagaggagtccccccttcggccgtgggcgacctcgggcctgggccgccagcaccgtggacagcgccaggagcggggcggggcatccatggagacgtcacgacgcgcggagtctcaggggcgcgcgcccgtgggcggctgcgtcacgtgacccaggtaattggcacggcgcgcgcgcaccccttccgcgcagccccctgacctgcagcctccggacctcgctgcagcgcggacccggcccgcccgcccggtgagcgcggcggcccgccccctcccggtccctgcgccgctgcttctcctgccgtcctggggaccggccccacagctcctctctcctgggtcctggggcgccgctgcccgcagccctgagtctggccccgccggggggagggggaggaggaacagactgtgaccttggctctgaccttggctggccgtggcctcccccgggacccccagcccatcgcgcgcgtaccacccggctagtccagggtcctgcgcagaggagcgggtgctcgcggtgggtttctccagcccgaggacttcagactgccccgcgccttccgtggccaggggagggcccggagctgcgagggctgtgcgggggatggggagggtcagcgctgtgcacctggcgggacccataggcagcttcggactaccaaggagcctaatagacggttttaaccgcggtctccgattacagatgagaaaactgaggcctgagagagggcggcatggcctgaggtcgctgcttgcatgggatgcgcttcttccgccccccgggagatgtgggagggggacggggtaatcccgaggccacagcaggctgcagtacgcattcgccgaaccggagagaccctttgacgcccctcggccacctggctcaagcaggccctagcagcccctccccagtgtcttggaacaggccccaactaaatagaattgcggtttgttgctgagcaaaagctcatctgcttctcagaaagtggggtcagagtagacctgctgctgagagaatccaggctctgctgctgcccagcttggagggccctctggggagaacccttcccggcctctgtttactgatctctgcaatgggtgcattagggagtagtcctcactagggcaccccagacagggttgtrtgtgtgggagtcttagtggccatggtgtcggcagttttctggggttgggttgaggttctgaggttgggttggggatgctatgtgaccttgtcctcagagaagagacccccaagagatacccagggcaactctgctggagtctggactgggcagggggttgcacagggcacctgactctcactccttgttgctgtccttgactgtatgggcaggaactagtagggctggcttgggctctggctctagatactgagccctcatgccctgctgggatgcaggtgggggtgggtggcaggctgccctcctgccaggctgggtcaaggtcacaacagtgcccagtggccaacccagactgtttagtgtttataaaacagtgttcctgcaccgggccattctggacacagccagactttgtccctatctggcccaaactgccccattcccctgtgggggtgggagtggcgctggcagagggagcagctctggctcagctgatgggaactgcatcgctaagagaaatctggcttacatattgactgcagtgatcagggcacagtcgctggaaccccacacagccctgtcactcaccagmttagccagcttagcctcttgcacctcagtttctctgtttataaagtggaactgatatgagtgcccaccccatgggatgttgggaggattaaatgagcacagtatctgtcctagaatcagtgctcctgacggtgcctattatgtttattcccatgacgatggtcttgatatctagtttcctttgccatagactggggatgataaagcgtcctgggttgtggattctttttgatgctctagaagattctccctgatgcttcaggagctcctgggcctagtggccagctgggctggcacgaccttctctttgcccaggcctctaggatagtcagaggtggaacaggagttgggaccctggctgcctgaccccagagctcatgcctggcacttggagaggtgctgctcccagaggagccggccccaagtgccccgcgctctagggcttggcatcactggctcgtgggctgggccacatgacccgaagcctcaggggctgagcaytggggagggaaacttgggggcactcagaggctcccaagctcacctccctcctccctgcagtggaatcttttttgttttgaaaattttctctgttcaggcttgctgctggttgccccaggagcctgtcctccctccattgaggtgacatcacccctttcctctggctcatgtgagttagaaggagggctgtgccctgccctctggtggggcctgaccttttgtggaaagtccagccagtgagtttctggtgacatggttgagctgatggcaggggtgaggcagaagggtgcaacaggtgttggctgagcacacctgaccaggagcgttggctcagggcctggcctgggcagtacttggaagccagttataccccagaatgcacattttctggggcctgagctgtccaggggtaggggactcctcccgcctgggcgaccccttgtggggtggtccttgcacccagcttacaagctgggcggtctgggcaggagggcattagctggtattcatggggagctgctctatggcagtggctgtgctggagcagaggaaggggttctgctcacagttgtagggtggggaacagaggtcccactttacacatcatgtgtaggatgaggtggcaggggtatggggtgatctgggacctcagtaggccctatcaacccctaacctgcctggatagggatatctggggggttctccaggattggcagaggctcttagaactcttaccgtctgcggaatagagaaagcccccatcactgaaagcccaagatttagatattttccctgggaaggcacaggtgacagagtgaggtgagatgagctgcagggcctggttccccgtggtctgggtgggcttccagtctgtacctgcctggrctgttagctgtcttgagtggcgctgggctgggcctggggctgccttccattctactcttcctgcccctccagaccttagcccttcctgcaatgaagtggggctattgttgggcctagtgtcaccagccttctggctgggcctgggagagagggcactctggcccaggattgcagtcacagggagtcactggtcacttttggtcgcaatgactagagccacagccctcctgagatagtgtgcctctatcacccccgacacctgtgctcactggatgcttttgcccctgcttttccctgaccatgcacaacacacctgacccctggaggactgcctgccctggttctagggtggtgggcctgagacccactccttcttggtggtactccctgcacctgccctgtggctctccgagtgggctccaggacctaggtgggtgctccctgaggcagggcctggggagttcatgtctctgcacaggctttggggactatccgggaaggagtgtggtctgggatgagtgtggcacagcagggctggggctcagggctgtttgatatctattgatagagtttactgagctgggagcttccaccagacagtaagcccagggggctgggagagtgtcacattcccagtctcatcactgcctagcccagcaccatctgcccagtgggaatgacaagtgctgatgagcggacagtggcttggtagagcctcttcctgtcttggtcctgccatttatgcctctccttcattgcctgtgtccagaatgagtcagctgaggctgctgccgtcccgtcttggggtacaggctgcgaggctcctggctgcacatgacgtcccggtgtttggctggcgcagcaggtcctccgggccaccggccaccttcccaagcagcaaaggtggaggcggctccagttacatggaggagatgtacttcgcctggttggaaaacccccagagtgtccacaaggtcagcatccccaccctaccctgggccaccgcaagggagggaagccctcgggggccgggctgtggcagggcagtggggagaagcagcttgcctgctgtgtgatcctgggyaggtttctttgcctctcaggtcctcagtcatcaaagcctgttgctttccctttgctgaatcagccagtgggtggtgrttttgattgagaggccctggccatgtcctgctcagccacacctgagccctgccgtgccccctttgtcgtgctatgctgcctccatatgctcctttgtatgtaattagggacatacgtgtttgtgtatgtattgatctgataaaataaatacttgctgatagtaaagaaaaaaattaaattagatgggagggtgaaaagtgaagttgttctctgaccccttcacctgcagtggaaagcagtgcagtcacatgatccaaagccagaaggtataagaagttacacagtcagaaagctccctcctaatctatcctcatctgctcagttcccactgtcccccaacttagtgtcctctatatcctttccaagacttgcattaggtaaacttactgcaaatgtaactctggatttgtctccctttacgcaaaagtaacctgtaacacatactgttttgctccctgctgttttcgcttggtgatgtatctccaagatctttccatatcagtacatgaagagcctcactattcactctgtccagctgtgtagtattccattgcatgtatgtgccacccctattcctgctgatggacatctggttcatttctagtctctgactgtggcgaacagtgctgcagtgcatcatcttacaccttcatcatcttgcacctgcagagccatctgtagggtaaattccccaaagtggaatagttgggtccaggagtggctgtgtataattttgatgggtattgccaagttgctttccatggggattgtaccaactgagtctcccaccagtgccgtatgggagtgcacggaggaaagcgcttttacattgttcttatggaaaacacatgcaaatgcctgtgtgtgttcacatctgctttttgcttctacacagagagtagcagccatacatcctcttctgcttcattcactttaaaacgtatcttggcaatattccatgtccacaatactgaaagcacctttttaaaagactgtgtaatcttccagattctaaatgtaaaatcgttatttagccagttttctatggatagccatgtaggttgttttcacattgtcaatttttgtaaacagttctgcagggaacatcgttgtatgtacatctaggcaccctgggaaggccctgagagctgtggtcctcaaggaagacctgacactccttggggccccagcctgggccacccctgactcttcccaggccctgacctggctgcgttcttgtttctgccctgcctagtcctgggacagcttcttcagggaagccagcgaggaagccttttctggctctgctcagccacggcccccttctgttgtccatgagagcaggtctgcagtctcaagtcggaccaagaccagcaaattggtggaggaccacctggctgtgcagtccctgatccgggcctaccaggtgaggggcagctgaggcacagcctgggaggctgcactggctcctggggtgtggccaggcrctgaagggaaggggtctcagctccaacatcatctccccagagagcccttctccttgtcctctactgagcggcacctactcctctagccagtctttgccacatcaycattcagagcacttaccacctgcttgaatttttttttgtgcatactgacttgtgtccttgtggtctgttccttgcacacaccatgccccgagtacgtggaggagcacttagtaagggatcaattccaaagcctgttgaatgaggggtgagtagattaacccttgttaattctgttttctcctctagaatgggcatcctgggagaacagggactgatacagcaggtgcctaattcatgtttatggaatgaatggttcagtaaacaattctcccccaccagttgctcctcctggagacttaggctctcccatgctgggcccctgctctgtcagagtcccagtgatggtgtgtgtttttggtcttgaccagacaggactaattggaggactgctgcggtgttcaggccataacaagcgtaatcatttggaatatctctgggaactgctggcaggaggtattccrtcagggaaatgtgaggcagcagcaagccacagcaaggctagggtacaggggggcattagcaaatggaaatgatgctttgcctctgaatgagctgcccaatctgtgggatggaacagagttccctgtacaccacccacctggggatggaagagggaaggtgagcagggttgggttcccttctggcctgaggacccatcaattgtgggccacctaggagcaaacagcagctattgtgtattgtgtctttcctggctggctgaaagaagcagacagtgatctaacccttgacttcaaaaatgaagaacaaggatgtaaaactgtatattaaatacagggaaacgttcagggtgctgcccgagggccttatcttctaagcacagatctcagcccttcagtagctctttgttctttgattaaccaagacgaggcattagagagttttcctggcagggtggcttctggattcaggtgtgttactctgttgtgcctggtgtggatgagctcccaccaggagggctgcagccccttacaggcgagtagcaggcacagctgtggttagaatcacctgcacactgtgctgaaaaaaaaacactgtattattataagcattttcaaacatrtaaaaggcagaaggatagtgcagtgagcccaccacccatcaatcatggccagccttgtttcatcaatttcccccttagcccccgctcactgctgattatcttgaggcagatcccagatatagcatttcattcattgaacatttctttgtgtatgtctagagaaaagggcttcttaaaaaatgtgccatgataccattatcgcatctaaacataataatgcctaatatcaaatatgcagttgacatttgtgtttgccttttgtcctgtgctttctttttttctttttagatggagttttactctgtcacccagactggagtgcagtgatgcagtctcgactcactgtaacctctgccccacgtggtcaagtgattctcctggctcagcctcctgagtagctgggattacaggtgcttgccaccacgcctggctgatttttgtgttttcagtggagacggggtttcaccatgttggccaggctggtcttgaattcctgacctcaagtgatctgcccgccttgscctcccaaagtgctgggattacagcgtgagccattgcacccagcctgtgctttctttttactgcttctttgaagcaggatccagctaaatccacaggttgcaataggctaaagtggctcttacgtctcttgtactttgcaggttccctctgtttctttttatgatgtggaaaaaccaggtggtttgtcctgtagggttttcccaagtctggattttgctgatggcttcctcatgatgtcatttcatctgtcccattgtcccatgtaatttctgtactttgacaattagatctagaggctcgatcccatagacatttgattttttttttttttcaaaatcagcttcctggtggtgatggtgatggcacttgagcagttagcagctgtggatagtgatttcctagatccattaactcactaggggttgcaaaaatggtgatatgccaattctgttttgccttctttattaactgaagtcccactatcaggagaaacttccgtttgttaactctgtttatcctgaggtgcagattgtgtaggaaagacaggatcactgctttatttttttcttttattcagtgattttcaaaattatgaggtgattccctagcacactccaaaagtgactaatgaaagtttatcttcttttttttggattcatatgaatgcatgaatataaacatatttgatgagtttcaatctgctgtaggtatactgtccttatagttgctcaaaacttgtccttattcccagcactcgtggtgtttgaacactgccttgatgttggtataacaagatrcttcaagctcagcttgtacatttctgcctattccagaactgtccaggtctctggctgtttcctgctattggtttgatcattacttctgggccctttcaggaatcagagccaggaaagggtttatactgatgcttctaacgtgctacaaatgtgggatttggggtttgtccttgaccctgtcaatcttatggcaacattgcctttagagatgtcaaaaatagaggttctcaaagatgccagtacaatggcttgtttgatttcccagagctcacatgcaacaatcttagaataacagttctttttttttttttttttttttttagatggagtttctccttgtagcccaggctagagcgcagtggtgcgacctcagctcactgcagcctccacttcccagattcaagcgattctcctgcctcatcctcccaagtagctgggattacaggcatgtgccgccacgcccagctaattttgtatttttagtagagatggggtttcaccatgttggtcaggctggtcttgaactcttgacctcaggtgatccacccatcttagcctcccaaagtgctaggattacaggtgtgagccactgtgcccagccagcataacaattctaacactattacgactgactggtaataaaaaagacttgatgaatttttttctgtttgtctttagggaatgttccattagtcaattggaatggtttctctctgtatttatgccactaagtggacatatttattcatttgattcatttcactttcaatttttaagacttaattttgttttataagaatgtaaaatatttacaaggtttgaaagtcaaatcttcaaagtaagataacttcttaaaaatctggctcctagccctgcctctctatcctattttgtcccctcccctagakgataatttttcttatgttgtggtttttttaaattttatgattttcccttctaatgcatatatttatttgtgtctcctttttattagataatgtgtagttcaccatacatactttgctagaatttgcttttttgcttaacaatattttttagagactaccttgtagtatcagatggggatttttcttcttccttttaatggctctggagtgctccgctgtgtggatcgcccatatccatgcgccagtctcctgctgatagacagtggggaagtttctagaatttcactattactagtagcaccgcagtgaacacctttgtgcataggtctttttcctgtttttgcccgtgcatgttgtacttccaaaccaggttgagctcctgccaccttactggctgtggctggggtctcgcaggcagcagtgaagtagccgcggggcagagacatggggaagcttaacattcgggaatgggaagagaggggctggggcccagagccttaccctggaggaggtctgtccagctgggtcccagccccaccctgctcttttccctcctcccagatccggggtcaccatgtggcccagctggaccccctgggcattctggatgcagacctggactcctttgtgccctcagacttgatcacaaccattgataaactgggtaagacccttcctcaggacggccatggcagtgctgtgtgggtggcccagtaaggggcccacgggcactagggacagcctgatccttgggaatccatggagcycggggagcagcccacagggcctcctttctaccttgcctgtgtactgcctgttgttcctgagaaggatgcctgccactttccctagcttgtgccccatgtgttcaagcctgagaggcttgtccaccctgcctccctgggctcactctcacttctgctccccaggttggacccagagggagggcactggggagactgggaggtctggtgagactgcggggctccacctrggcctgacctccctccctccactttgctgcccggggctcggccacgcctccttctccagccttctatgaccttcaggaggctgaccttgataaggagttccagctgccgacaaccaccttcattgggggctctgaaaacaccctytctctgcgggagatcattcggcgcctggaggtgagcacaggcrggtgtgtggggtgcagctgaagcagctctttggagcttgccagaggacgggaaggcactgtcttttttgttctagacagcagggatgtcagccgtccctcttccccgctcctcatggggtcccaatgtgtctccccagaacacctactgccagcacattggcctggagttcatgttcatcaaygatgtggagcagtgccartggatccggcagaagtttgagacccctggtgtgatgcagttctccagcgaggagaagcggaccctgctggcccggctagtgcgctccatgaggttggcaccacctggagggccaagtggctggaggtcctgctccagggctctatgagacgtcccacaccctgcctaagagagcaggagggtrccacaggaaggcaggactggatcggcctcaccactggctgcagggaggagagttgggaccaggtgtttaggcagtttggccaagagctggcccaaggcasagcaggtcaggtgggcagggatgaggctctaggagaacaagagagcggggacactgagcaaggccagaagtggcgggaagtggctgtgggaacatttgggcagaaaattatccctggtgtggagtgactgtggccacaccacctgtctgttcactggacttttctgaagctgggtcccccagggctkcaggggcttgggggagcacctgactcagctgctggatgcaaagtggattcctgagcagcgaggtgtgggctggagtttggatctggctgggtggagatctttgggacttggcgaagagagcccttgagtgtggcaggagggtagtgggctaggagtgggtgggcagtggcctgttggaggagcttggctatgaggaagagagagggcggcagctgggaaggggtgtaggcagaggcgtttggttcagctgggaagatgcctagcctcccctaaccctgtgttcctttgctgggtgggacaggtgtatccatggtgggccctggaccatgtaggtggaaggaggatttgtgacttcctctgtcctcagcattcagctctgagcactcatgaacagcccctgtgagccccagtcccctccctctccatccctttccctttcctcttcccatcctctccccaagcaggtttgaagacttcctggcccggaaatggtcctcagagaagcggtttggcctggagggctgtgaagtgatgattcctgccctcaagaccatcatcgacaaatccagcgagatggggattgagaatgtcatcttggggatgccacacaggtgggtccccctccctgctgtgccttgygcattctcctccagcccagggracagaggtgggagagatgagatggaaatcagagcggaggtgttggtgggacctgggggtagaggtgggtttcctggaaagttctgagtcctgggcctggcctgctcgtcacagaaattgccgggtacttggccagagtcacctggggccgggtgctaaccaggttatcaggcaccctctctccctggccatgttgcctctgtccctagcaagggtgagatttcagaaagcggtacactatacttcttgaggttcctgtggacaaggagaggtggagggatttcttccagggaagggagggcagggcctgggcagttgttcccgggttgtgtccccaacagggaggtctgtggaggtgagccgagggtctctgacctggctgcaagctgactgcgtgttcccttgaccttgatgaagatctaggaggcttgctcagcagtggggcgttacctctgagctggagcctgtggggaagcaggagggggaatgcaccctgggggacagagacgtctgtggccaggggtcctgctgagtgggcatgtgcagatgtgcagagtggcctgtgggaagggccctgggcttttcccgtgaccagagagctgcttgtggttggactagcccagggctacatcagcatgagggcatccaaatgcatggtgcaggggtccccattygtggctggcctgccaggactttggggtttgtctgtcatggggggcctgggaatgcccagtgtctggtcagagagttaggcagagctggcccagtggcctgaggcagcaagaaagcatggggctttaagcctcgggccattacagcagcaggagaggatggtgcctggtgattgggtggyctgaggagggctctgggcacgaaggggctgtattaggccaggccaggcctccacagtgggggagggaaccctgaggcctgcgggctttgccaggtgagagcccggcccctctggctccaggggaaggctgaacgtgctggccaacgtgatccgcaaggacctggagcagatcttctgccagtttgaccccaagctggaggcggcggaygaggtgggtgccatgcccaggtcccggcacccttggagagctgggtgtttgggaggtggactgtggaggggctgagccgggagcttccgggctgagataaaccttaagatggatgcattggagaagcctgcaggagagaggctgggtgtttgcctgaggaccctaaggctttttggagcaagggctgcagtctctggtagctgggagggccctcagataatctgggtcaacctccctgttttgagctagggaaactgaagyccaaagatgcaaaggcttgctggaagttgctcagttctgctcatgtggctgtgcctccatgtccaaagtcctgtccaccagccaggaatgactcccttgctcatttgtttgcccagcagagccttgggaggtgaggatggttttccgtacccatcgacctgctgaggaaatgttgttcctgctcccacccsctccctgggaggcctkggccaggccttcagcccatactgcctagcctctttctttccttttctttttgagatggggttttgctcttgttgcccaggctggagtgcaatggcatgatcttggctcactgcaacctctgcctcctgggttcaagcgattctcctgcctcaaccttccaagcagctgggattacaggcatgcgccacsacgcccggctaatttttgtatttttagtagagatggggttttgccatgttggtcaggctggtcttgaactcctggcctcaggtgatctgcctgcctcggcctcccaaagtgctgggattacaggcatggagccaccgcttccggccactgcctagcctctttcaaagtcctgcccatcttccctttcggtggctctctgggtcccctgggcartgagcctgtcactccctcctctgtgtccctttgccctcaggactatctctcctgctgtctccagcctgctgccgtgtgtgtgtgtgtgtgtgtgtgtgtgtgtgtgtgtgtgtgtggacccatacctactggctcctatcccaggtctttctgacatcctgttccttttgttctagcaccttcagccttctaagcctcactttgctcttccrtaaaacagggataaaagcgcatgcccgagaatggttgcaatgagtcaaagatgacctgtgtgtatagtggaaaacttggccaaaggatgtttaaaatgaaattactattttttttcaactgaaaaagaaatttgatcattgtgaaaacaacaaaacagaacaaagcttatacaatgagaatatgttcctcagtgagactccattcttgtggccaattttgtttgtgtgcttctgttgtgtttaggtgtgtacttctagaaacatttcatgctgatacaaacaaacctctttttccagtgcaaccttatttctaagaggccatgggcatagccgtgacaccgggtggcaccttgctgttttcacttaacaagttgtcattgtttcctgcctgcacacatgggctaccccaggcttcttacagctaaagcatcccttgtgctggacattgggttgttctcatgagggtccttgcacatgtgtgagcgagtttatctgttagatggtgtccgagcagtgcagcggctggagctacggrggtgggactgaacgaccctcccaggagctggcagatgtcagcgagcccatccacagtgtgtgatggtgccagagcccccaccccacttcctcctacacgctctcgaatcctttcatctttgccgatataataggttcaaaagaggattttgttgtaatgcatttctttgttatgaattcagttgcttatcttttcacatgcttttgagccattcatatttttctgtaaattcctgcttgtggcttttgctcattttcctatggagtttttgggctttatcttcctgatttgtaaaagcgttttgtacattgagggaatttgccctttgcctgcatttgtttatgaatatttttctcagcttgatttgtttcccctatcgctgggcgtgggtttgctcccccatggcaaatttgctagaatttaggtgtcttttgtgttttctggtgttaggatattgtgtagaatgctgtaagtcttccttgcttcagggtcataaaatgttgtgtgtycctcattgctaccattggtgtgaggagtcaggggattcagcttcagtgtttgctggtggcctggccgagggtctctgcgctgatgcctaggcactgcccttctctccctgccttccccaccgctggatggccttccccactcttgtgctctcctgctccatggtcagtgtacagagaggctctgagccaaggcctggggtccctgccttcctccctcaggccagtgaggaggggcagtgtgatgaggagagaggggtcagagacagcttggccctctgaggcagtgggatcgggggaatgtgccagcctgactgtgggctgcagtgcctgcctgtgtatctgcctgtctgatgtgggaggggaggatccatcatgttcccatctccaccttcagggctccggggatgtcaagtaccacctgggcatgtaccatgagaggatcaaccgcgtcaccaaccggaacmtcactctgtcgctggttgccaacccctcccacytggaggcagtggaccctgtggtgcaggggaagacaaaggcagagcagttctaccgtggagatgcccagggcaagaaggtgagctcacctgggggaacccagaggacctgggcccttcagggtgggcccagagggctgggctggaccctgggtctccacagtacaggtgcyggctgggctacatgggctggggcacgcagcccctcctggctcacacctgccctgcaggtcatgtccatcctggttcatggggacgccgcctttgctggccagggcgtggtatatgagaccttccacctgagcgacctgccctcctacacgaccaatggtaccgtgcacgtcgtcgtcaacaaccaggtgagcatgtaggctccacgctgggcctcacagcgtcagcatccctggaaatccaggcagtagcttgcggggaaagtgagatgctcctggctctgagcccactgctgtgctgcttaccaggcaggaccctgctctttccagccttggtgtcctggtctgtgaaattggaagacacaatagggagggataagtagggctggaaggaccaaaggagcacctgtgtagcgagtgcctcatggaggctggccgtgtgcagccccacatgggcaatcttagacacagggaccttggtgccctttctctaaggcagctgagcttctaacagctcatatggagtctagaaagccctgtgttcactgccttgtttgcattaagtcacgtcatcgtccttgaacatcctgtgaggtgggaatttaagtgacccctttttatagatgaggaaacaggctgtgggtatgtaagcaccttgccccaggttgcagttagccgttgttaggactggattttccaggcctatgttcctcactaccagtgtgtcaaagtgactggcgaaaaagagcaggctccacccggctggtgctgctgccgtccccgtgggagctgttgccgtgtctaattgtggggctgctcaccatcaccctgttgtgtcccacattcctcctgggcacctcagtggaccttgagcatccccctgctcagtctccaaggctggcaccttctatctcactctaagtaaattgagaggcgcagcaggtttctcctgcctctgcagattggattcaccacagacccccgaatggcccgctcctcaccatacccgaccgacgtggcccgggtggtcaatgcgcctatcttccatgtgaatgccgatgacccagaggctgtgatatatgtgtgcagtgtggcagccgaatggagaaacactttcaacaaagatgttgtcgtggacctggtgggtctggggaytgaggccaaggcatgggtgggtggcccatccctgctgtgctgagccagccakgtcatcagcatcttcagcactcagggctgggagtgcttcttggatgagagatttatgccaccaagagcaatctgtgcaaaggcctgggacgggacattcattcggtgataggtgatagtggagctcaaagggctcccagtgggtgtgccctacccagatattccccarttttgcagcagctacattgaccacacagcgtagggaagggcctgagcccctctggctgctcctgcaggtctgttaccgccggcgtggccacaatgagatggacgagcccatgttcacccagccgctcatgtacaagcagatccacagacaggtgcctgtgctgaagaagtacgcagacaagctgattgccgagggcacagtcaccctgcaggagtttgaggtgggcaggcaggctgcaggggcgcccaagacaaactttgggtggggaccctggagagggkttgtagatgttaccagcccagtgctgggcactaaggatttaaagaagtagccactatggtccttgtccccaagaggccccagttaccaaaggggaccaagaactaaggatgcagttacagccaagtgggacacagtgggtactgcaatgtgggggaagtccagccttgagcaggagtgcgggaaggcttcctgtaggaggcagccctgagctggggttgtccccataattatctatggagtgttcgtccttccaccttcatggagctctgagggcaaggactacaagtttccrgagccttctccaagccccttgctgagcgcactgcaggcctgcccagcctcggggtacctgtacaggatcccctgaactctgagactttggcttctagccatgaggtccctataggccagagacagagagttctagaagaacttggtgatggggaccaggacttacgagtccaagtggactgggcrtctggctgcgcagggctttggtgctctgtccacatcttcatcctgattccaggaagaaattgccaaatacgaccggatctgtgaggaggcttatggcaggtccaaggataaaaagattctgcatataaagcactggttggactccccctggcctggtgagcgagcagtgtgtggctcagagggactcccctgggccttgaggtcttgcactgggatcaggactggaatggccctgggtgacagctgtcattgcctagtctagaggctgcaggctctatcactgagtccccaaagctgcgtggggccgattcctgcaagtcaaggatagcattgccctctgagcatggatggccaggtgctcactgaaaagggagggcatagccaggtgggagaggaagccctgggcactggatgcttggggccagggtgctcagagggcctccctggggggcagggttagaagagctgttaccctggggcccagaggtgggtgttgggcctgtgggggagttgcagctgtggctgtccagctgtcccaggtcccaagggtgggctcagggtgagtccgagtgccggtggagtttgggaagccatgggccactcagtcctggggaggcaggctggccagggggatcagaacccaccactgacacagtgtggacagagcctctctccctctcaggcttcttcaacgtagatggggagcccaagagcatgacatgcccagccacggggatccctgaggacatsctcacccacatcggcagtgtggccagctctgtgcccctggaggactttaagatccacactggtgaggttgctggacaggctgcagcccaggctgctggccccaccccaacactgtgcctygaagggagattggttgggatgcaagagagatggtgtgtcgcattcctgctcagtctgtagtgggtccacgtagctctcggcaccayrtctgtgcccgtgacagtagctcttttcagggtgggygtggcgagctgggcagctcyagatgccacactcccagctgggtaccagtgactagtcttaggttggggaccttggattttccaaatgcctttgccggggcgtccctgggtcaggcagaagagcaggaaagcaagggctcccayacaggggctggaacgcagcctggaacgtgggcagaattctgcagctgaaaggacggtggcttgccggggcctggaccaatgaccgagggcagcccccccactccggggtgagactagaatgtgggtggtcaccgactgcatcccttggctggggccactgtgacctttgcctgggaagtccggagggtcccctgtggctgtattggggtgcctacacaccctctgacccacctgggrgagttctgagggggttcccttacagtgtgcaccgagaccgagaccgaatgtcctggggcagctgctgacagcgtttggggcatgtgcccgctctgtttgtgtgttagcctctgtgtgtggggctgacaggagcacagcataagcctggggacttggagtcaaatccgtgtaccttgacagctgtgtgatctgagtaaatgactctgagcctgacggtgtctgcarcgtggccaatgcttgccaagtggtacctgctccacccctccacaggctyggggtagccccttgtctcagctggaggaggggtgcctggccctgggccctcctgcagcatccctgccctccaaccaaatcaacagatggctgccctgctttgtgcggggtgtgtgctgagcacctacctacccgccccagggctggctgtcccttggccctcaggccagcactcctttcccacaggcctctstcgcattctgcggggccgtgcggacatgaccaagaaccggayggtggactgggcgttggcagagtacatggcctttggctccctgctgaaggaaggcatccacgtgcggctcagygggcaggatgtggagaggggcacattcaggtgagcgcagtggggctcagcatccgcacaggagacctggagcagaagctgggcctggcttggggatcccgagggggcctttgttggggtgggatcttcacagcatccctagcccctgccctcaggtggcatcatcagatggccacctcgctgaccccccagggcaagtgtgcagagctcactgctgggcccaagctgtccactaaggtcaagctggtggccatctgtggtcctcaggatcatgtgtgtgtggggggtgtgtggtgagtgtgggcgagttgygtgtggtgtgtgtgtgtggtgtgtttggtgtgtatgtggtgtgtggtatgtggtgagtggggggagtgtatagggggtgtgtgtggtgcgtgtgtgtggtgtgtttgttgtatgtgtggtgtatttggtgtgtgtgtgtgtatggtgtggggtatgtgtgtggcatgtttgtgtggtgtgkgtgtggtgtgggtgtgtgatgtgtgtgtaggtgtatttgtgtggtgtttggagtatgtgtgtggagtttggagtgtgtgtgtgtgggtgtgtggtgtgtgtggatgggatgtgtatgtatgtggtgtgtgtgtggagatatgtgtggtgtgtatggtgtgtatgtggtgtgtgtgtggagtgtatgtgtagtgtgaatggtgtgtatgtggtgtgtggtgaatggggggtgtgtgtatgtggtgtgtgtggtatttgtgtgtggcatgtttgttgtgtatgtggtgtgtgtggtgtatgtgtttgtgtctgtatggttgtgtggtgtgtcgtgtgtgttgtatgtgtggggtgtgtatgtgtgcagtgtttgtgtatgtgtgtggtgtgtcgtgtgtgttgtatgtgtggggtgtgtatgtgtgcagtgtttgtgtatgtgtgtggtgtgtcgtgtgtgttgtatgtgtggggtgtgtatgtgtgcagtgtttgtgtatgtgtgtggtgtgtatgtgtgtctgtgggggatgtgtatggtgtgtgtatggcatgtgtgtaggggatgtgtgtggtatgtaggggtatgtgtgtctgtgggggatgtgtatggtgtgtgtatgtggcgtgtgtgtaggggatgtgtgtggtatgtaaggggatatgtgtggtatgcgtgggtgggtgtggtgtgtagtgtgtggtgtgtgtgtggtgtatggtgtgtgtgatgtatgtgtggtgtgtgtggagtgtgtatgtggtgtgtgtgatatatgtgtggtgtgtgtggagtgtctatatgtgtcgcgtttttcattctatgatgcacgctgagggggggggcgtatgttcccttctctgtgctcttctcccccatacatttcgtgccccccctgaccttttatttactccccctcaggatgcccacctctatgcacatccacccctcgcgatattatcccggccatacctccatttccctccccctttctccccccatatcccccagtcctccgctccccccccccccttattgctctcccgacccactccattctccattccctatttaaaattttcaccccttcactaccccccccatatccctgcccccacccatcccccctcccccccttccttttcccacccttccacatctctatcccaccctccnnnnnnnnnnnnnnnnnnnngaagactgtgtgtggtgtgtgtatgtatgtgtgtggtgtgtgtgtatgtatgtgtttggtgtgtggggatgtgtatgtgtgtgtggtatgtgtggcatgtgtatgtatgtgtgtggtgtgtgtgtgtactgctgttaagtcagcccctatcttgcttgtttgcagttgtctttgtgaatccaaatggggacttgacacttgtcagttgtccacaccacatttcctctggttcgggttcctaaaatgttctagatcctgcctcagtccgctcctggttagcaagccagggtggtgtggcttccaggacttgaccagctggctttctcattcctggttgcttatctcggctggtcttgctccagccagggcccaggtggccctctgatgcacccwgagctacctgtcagtccttgccagggactggggttcagccaggcgcccctcacttactgtgcccacctcggctactgcacrgtggtttctgcctcttgtgagttgggacagggctggtgagatggtaaagaagccagcaagrcggggcaggggaagtggcctcctagggtctctggctctagctggcacctgggaagtgtcttatcaggtcccctttatgggtgaaaagctgacattcagagaggtgccacaactcacagctccttcccccagaccccccagtgcgtggtgtgtgggcgctgctagcaggcagggggcaggctggggaggcctggtgggggacaggctgcaggagggaccacatggctctggttttccacagccttcttggatgccatgttgtgggaccctgcaggtttcctgggacartgacggaggcttgcctgcctcctgctgcccagctcccctgctccaggtgaacaggtgccagcccacctgccctctgtccctgcccyggtctgtgtctctgcagtcaccggcaccatgttctccatgaccaggaggttgaccgcaggacgtgtgtgcctatgaatcatctctggcctgaccaggccccgtacaccgtgtgcaacagctccctctcggagtacggagtcctgggtgggtccacgctctcctgcaggccaggcaggccccagacacctggggacaagagatgggctgggaagggaccrgggccagggcctgggaggggcgagagatgctcagaggcccttaggggatggccctgggggatggtgattgggctgccctcacctaaggccatgtgggaggtgaaatcgtgtcccatctgggccccttggggatcccagttggggggacctccttrccttgaggggttttgtgggtatcagggccccagtgggcgcagacagagagcccaacacagtctgctgtgggttccagctgctgagcagtccagtcttggcccagccctctcacattcctttgagccccatcttgcctcctctgccctgcaccctaggaacactgcactgagatcccttctctgggctctgggcttccctgcctgtgtcccctgtgcatgctctccctcagatgcatcattagctggctcacctcgtcctcactgcctgcccctagaggccaggcagccccccgcccccaggcagatgcctctagggctgtttctgccccttctccttagcagctctgcatgtttttaaggagttcttgacagatggtccctgttgcctccccaggatacctaaataaggttgaacctgaccacacatgatagcagggctgagggtagcatctctgagcatgttgtcagcccccaggatgktacattgtaccctttgaatcccagggaatccctgggttcgtcctggcttgtgagaaggatgggtgggggcatggaggatatactgagaaaggctaaatttgactggagccactgccacttggtgactgygtgcagcaagctctatcttgtcttctgtttaggctttgagctgggctatgccatggccagccccartgccctggtcctctgggaggcccagtttggggacttccacaacacggcccagtgcatcatcgaccagttcatcagcaccggccaggccaagtgggtgcggcataatggcattgtgctgctgctgccccatggcatggaaggcatggtgagggctgcggtggtggctggtggcttggtgggttctggcgggccttgaaggggcgggatggaccctgggccccttgtcgggttggacggtatatgccttccaggcccctggagcacgtgggtctgtgcagggtggggtctgcacatgtgcatgctgcagctgctgagacgatgatgctacccctggcagcagaaggcgctaccacgtatgagtgcttgctgtgcgccaggcactgttcaatgcttctgaatgttaactcttccaatccatacaacttaatgaagtaggctgtgttcctgcttttcagatgaggaaacagaggcacagagctggggagtaggttgcccaaggtttcacagctagtagctggggtttgaagctatcctgtgcagtactgcctgttctctggtcccctcctgtatgacctgcctctgcagccacacatggggcagagggaagacatgcaggctgggtgcatcctccggaggctcctgggctagcaggaagggaggaaggagcagggtgtcatgtgataccatctggtgggcaggtggcctgaccaggcagaagggagacaggcagggggctcattgccaccattatccctgagtggcatgttatgagcactttacaggctgcatactcggcatcctcacaacaccgggtatcagtgaggagggaggtgaggctccctgcttggggctgcctgccgtgaaggcagcttcttgggaggccagatctgggccaggctgggtgtggggggctgggtccttggccgtccccaccaagagagggcaagtggcagctgtgcagtgggtcatccccgtcctgcaggagctggcttggagatgcccctgggcttgtcttgctgctttcatggagcagagcggtccgtgtgggtgagggtgggcgaggcccaggccgagttgggttggcccctgcctggctgtgtggtcatgggtggtttcttacmctctccttgcctcttcatctgtgcagtggggaagagtgtctgcatcatggggctactttgggggttagcgataaggcgtgtgggattcctagaactctgcctcctgtacagcaggtgctcagtcagtggcagccactgttccaggacattccagagaaagcacgtctcagtgcgggctttttgctttttcttctgtccctgcaagttcacatactgtgctagctctgggcagaccccactctgaggattcccattctgctcttgttccacattcttggttcttttctatggttcaggctccagggtgagggcacctctgctgagaagccctccagactttcccctgagcctggggtccctgcagrgccagatgtctttcccatggtggggtccagccttggctgtctggcgtttgctttcagggcccagagcactcgtcagcgaggcccgaaaggttcctgcagatgagcaatgatgactcggatgcctaccctgtgagtgttgctgctgtccccaggacagggacgcgccctattgtgcccacagggctaggggtccagggtgtgggtgcagcagacagccaccctggccatatgcatctcgtccccacaggcattcaccaaggacttcgaggtgagccagctctatgactgcaactggatcgtggtcaactgctccacaccggccaactacttccacgtgctgcgccggcagatcctgctgcccttccgcaagccggtgagtctccgtcccagggcaggggtcacaggcagggggcctggccaggcagggccagctggcagctgggcgtgtatttcccttccagctgattatcttcacacctaaatctctkctgaggcacccagaggccaagtccagctttgaccaaatggtatccggtacgtgcctggcctgggtgtgtggggtagcccacaatggggcggtggcccaytgtgtggcttctgcttctggggcttctccaacctcccctctgcctgtggctctgctgacctgcagcagctcctggcatggtcccactagcagtagggttgggaggttggcacaatggctgacctgggccagctcaggtcatgtgggttgcgtccatggtagagtccactggggcccccttagaccctagcagggctggtcgaggcctggcagaggcctgctgagttcgcaagatattgagtatcattcattcatttgtccattttaaaaattcatgagccaaacagacattacaggccctggggtcctggtgtcccctccaggagtctttggccttatttccctgggagtcagatcagataaaacactatagttgcaactgagaggtgactatgtccagggaaggacaggtgtgaggctggtggagcagagctgtcttggaaaatggtcctgggcagtagagggagggctgggaagggcctcagcatggacaggggttggattttctcccatgtgtgtttggatgtcccctctgtgcaggtgggcagctgttagagctctgatgtcgggactggactacctgggctacctgccctgtgctggcttctctcttgagggcctgggatccatttgtcctctctaccccagagtcttcacctgagatgcagggatgtgaggacactacagtagcttcctgagaggttttgcagtgtgcgtgacctggggtcaggatcatgggctcaggaaggaagaatggttggggcttggaggtgaagctcagctgccaggctgaaagaggaggagcatgcagcagcctcctgggacatctgcttagtggtgggggactgcagtgctctgcaggaggtgggcgcagctgggcagaagcaaggttggggcaaaggatgatgccatcatgttgccttctctgtctccttcagggcgcttcttattgtacccccacctccggtcaccttaaacgtgatgcttccagggctcaacccttgggtgtctccacccctctccctatgacagctcagggtgtcatctgccccctgctccatcttttagttcaagaggtgtccactgcagccacaagtccaaacctgcagttagtgtcagtggctaaggagagcctggggatgcaggcctggtcctgagctgccccarcccctctgggtaccaacgcctctgccatgtcctgttggtccctcagggaccagcttccagcgggtgattcctgaagatggggccgcagcacgggcccctgagcaggtgcagcggctcatcttctgcacgggaaaggtgtactatracctggtgaaggagcggagcagccaggacctggaggagaaagtggccatcacgcgcctggagcaggtgtgcctgaaccccttgtacagtcaagtgatgggcaagctcacgtcgctggccccggctctggccaatgtgccaggcaggccagatgaaggccggtgaggccctgtgcctcctgtccrggggtgctggggacataccgcccctcctctggctatgctcctttgtttctgcctccccagatctctccattccccttcgacctgatcaagcaggaggcagagaagtacccaggtgcggagctggcctggtgtcaggaggagcacaagaacatgggctactatgactacatcagcccacgcttcatgaccatcctgaggcgcgcacggcccatatggtacatggtggggccgctgattgcccctcacctcggccctgaggctctgtcctggctccrtctgtcccataggccatgctacccagaactggccctgcccttctctggtgatgagcaatgatggggcatcatcagtactggctttgtgtttgttctgcagccagaactgtattaaggaacctgctacatgtctcaaaactcctgccttagatcttaggccggttatgtagtccttggagccttagtccctgcatctctacaaagggcggtgataagattagatctgatgtatgtattagctctggcacatggtgcgttcccaatactggcatcatgtgttcctgggaagatgggagagggtcctgagaaactccaagaagccaaaagtatgtttgtccccaaagtctttgagttgttgcctcatttgttgtcctcatgggcaagtgcagtgacatggagggacagtttctccccactcttctgtggctaggtgactgagtttgatccgggctttgcagctcattggaagtggtgccagggccaaaaggcagggtctatggcttcgaggtcagcggttctcagatgcgtgccccctgcagtcccggagtgagggcagcggttggggggcggctaggccccgccttccccttagcttgtctctcctcctccaggtatgttggccgggacccagcggctgcaccagccacaggaaacaggaacactcacctggtgtcactgaagaagtttctggatactgccttcaatctccaggcctttgagggcaagacattttagagctgggcaaaacctgtgtaggtctygctgtgggtttgctggggaccaagggggtgatgaaaaggggaggggcggagctcctgcccargagaggggctgtggggccccaggataaaacagacacagtgacagggccaagagccagcactgctggccttggtgtcatgccagaatctaccaggactgagggagccagaggagtcctrtaggcaggctactgtgctggagcatcccccagctgctcccatcttgctggaatttcttgggcggcttctccacctgtatctcaagacagacacccgggggcctgtgtctgtggccgctcccatcccggcagccctggctgctgctcgccccaccctcgcttatctgtagattcaaagcgatgttctcttctgtgctcttagaagtagggagttcagcagtaacagccaggtgaagcgaacctgctgggtgatttgtttgcgctctgttttatggggcattcctgcgagatgtgtcagcttctgtrtgaaatgcagccacagctcatgtgtaccaaagtagaaaaccaaatcacagagaaataaaaacatgcttcagagagatttgctgttttcatttcatgttgtaaaactgggggagggataggcagttgagagaaggtagggaatggggagaaagttaaaaaaatggagagaagaaaatatctgcctccatggatatttttttgagacggagtttggctcttgtcacccaggctggagtggagtggtgcgatcttggctcactgcaacctccgcctcccagattcaagtgattctcttgcctcagcctcctgagtagctgggattacaggcatgcgccactatgcccggctaatttttttgtattattaatagacggggtttcaccatgttggccaggctggtctcaaactcctgacctcaagtgatccgcctgccttggcctcccaaagtgctgggatgacaggtgtgagccactgcgccagattttcatttgagcaccaggtagtgtctgttggcttctccactctggccttttgtgggttttgcttccctgtggagatactggagaagctgccacagaggagggatgttttgcttggaacagatcatgtgttcatttatccccttctcagagcacttcctccgtgcgggacactagggcccgggtggaaggcatctgtctgcatgctggcttttcgcatcgggagtccagtggggagacatgtcagctgtttaattcattgagttacgagttatgttggaagtcaatgcagacagctgtgggtgtcagggaaggatccctggaagaggtggtgttcaaaggaagaggaaaagagagatgaacctctctggaacagacagaaatactgaccatagggctggcatgagcaacctaaaagaacgatcagcgtgaggttggacagtggagtgttaagttttatcagcctcaaaaatagcttgttgaaaaattagctgggcatggtgacacgtgcctgtaatcccagctactcaggaggctgaggcaggagaattgcttgaaactgggaggcggaggttgctttgagccaagatcgtgccactgcactccagcctgggtgacagagcaactctgtttcaaaaaaaaaaaaacagagtatgtcttgttgagatatactttgaatcctaccacagggacattcaaagtgacataaagtgaaaagaattgtagcccccatttatagtgtctgtcgtgtcttgggccttctgctggatgttttgcgtgtgtaattaaacgctgtctaatcttcaccatggctttgcatgttgggaatatttccattttatagacgaggaaatcgaggttcatataaagttatttgcccaaggtcacttcctaaggaagtggtggttttggacttcacctctgtcctcaagaccacattgcttcccttggggaaatcagctcttcccataccatgcattcctagccccacagaaatccactagtctgggctttctctgcgattggctgaggcagcaactggtgaggcacctgggctgtgcaggagcccttggggatcagatggtggatgtggcctgcccaaggtgcatacagtcccttccttagtgtgggtacgggaaggctgtagataggccagaggtcatctcctgcaggaagaggtacaatcagccaggcatggtggctcctagctatagtcccagttactcaggagactgatgcaggaggatcacttgagcccaggagtttaagaccagcctgggtaatgtagcaagaccctgtctctttaggaaaaaaaaaagggaagaggtgcaaccaccagattaccaaattggggaaaaccaaccacataaaaaacggctccaaaccctataaacataagaactaaccctgggatgccgggtgcggtggctcaagcctgaaatcccagcactttgggaggccgaggcgggcagatcaccaggtcaggagatcaagaccatcctggctaacacagtgaaaccccgtctctactaaaaatacaaaaaaaaattagccgggcatggtggtgggcgcctgtagtcccagctagttgggaggctaaggcaggagaatggcgtgaacccaggaggtggagcttgcagtgagctgagatcacaccactgcactccaccctgggtgatagagcgagacgccatctcaaaaaacacaaccaaaaaaacaactaaccctgggaaataaaacaagctcatggaacaagcagaaggctttaaatgaactgtagtaacttcagagggcaaggagaatattgctgctatgaaataataacagactatttttaaaataattggatgttaagaaaatatgaaattttcccaaaattaaaacctcagtagataggctgaatagcagaacaaacacagctgaaatacaaaataagtttgaagacaaggccaaggaattctccaaagaaagttgaacaaagaacaaatatatatattttaaaattctttaaagaaacatggagaacacaggagtttcacaatgctgatactgcatctaacaggaatcccaggaggagaagacacaggggatctttgtgatggaatgtctgtctcttgactgtatcaatgtcactgtatcctggttgtgattatcctagagtattgtaagatgttattattggagaaaaatgggtaaagattctctgtgatgtagttcttaatgatggcatgcaaatttacagtgatatcagatacaaaagtttaattaaaaaatgagttgtctgctccctattgagttgtaagggttccttatatactctggaaacaagtcctttaccacatgtattttgcaaatattgtcagtctgtggcttgtattttaaatttcactaagagtgaaagatttttattttcatgaagttcaatttatcatttttaatcatttgtgtttgtctgtttgggttgctataacataatgccataaactgggtggcttgtaatatttctcacagttctgcaggctacgaaatctaagatcaaggcactggcagatctggtgtctggtaagggcctggcctcctcagagatgatgccttcctgcagtgtcctccatggtagaaggggcaaacaagtctgcccctggacctctcttttaaaaaatttttaatttaatttaattttttaaaatttcaataggtttttggggaacaggtggtgtgtggttacatgaattttagtggttgatttctgaaattttggtgcacccatcacctgagcagtgtacactgtacccggtgtgtagtcttttatccctcacccccccaactctttcccttgagtccccagagttcattgtatcattctttattcttttctttttttttctctattgcgcaggctggagtgcagtggtgcaatctcagctcactgcagcctccacctcccaggttcaagcgattctcctgcctcagcctcctgagtagctgggattacaggtgcacaccaccatacaaaataatgtttgtatttttagtagagatggggtttcaccatgctggtccagctggtcttgaactcctgacctcaagtgatctacctgctttggcttcccaaagtgctgggattacaggtgtgagccaccatgcccagttccgttatatcattcttatgcctttgcgtcctcatagcttagcttcgccttatgagtgagaacatagaatgtttggttttccattcctgagttacttcacttagaataatggtctccaattccatccaggttgctgcaaatgccattatttcattcctttttatggatgagtagtattccatggtgtgtgtgtgtgtgtgtgtgtgtgtgtgtgtattacattttctttatccactcgttggctgatgggcatttgggctggttccatattattgcaattgcgagttgtgctgctatatgcatgcatatgcgattatcttttttgtataatcacttcttttcctctgggtggatacccaggagtgggattgctggatcaaaccgtagatctacttgtagttctttaaggaatctccacactgttttgcatagtggttgtactatttacattcccaccaacagtgtaaaagtgtttccttttcaccacatccatgccaacacctatcttttttttattttttgattatggccattcttgcaggagtaatgtggtattgcattatggttttgatttgcatttccctgatcattagtgatgttgagcattttttcatgtttgttggccatttgtatatcttcttttgaaaattgtctattcatgtcctcccactttttgatgggattgtttgtttttgtttttgctgatttgtttgagttccttgtagattctggatattagtcctttgtcaaatgtatagattgtgaagattttctcccactctgtgggttgtctgtttactctgctgattatttcttttgctgtgcagaagctttttagtttaattaagtctcatctatttatctttgtttttgttgcatttgcttgtgggttcttaatcatgaagtctttgcctaagccagtttctagaagagtttttccaatgttatcttctagagtttttatgggttcagttcttagatttaagtctttgatccatcttgagttgatttttgtataaggtgagagatgaagatccagtttcattcttctacatgtggcttgccaaatatcccaacaccatttgttgattagggtgtcctttccccactttgtttttgtttgctttgttgaagatcagttgactgtaagtatttggttttacttttggattctctattctgttccattcgtccataagcctgtttttgttgttgttgttttattttgttttttgagacagggtcttactctgtcacccaggctggagtgcagtggcaccatctaggctcactgcaacctccgcctcctgaattcaagtgattctcgtgccccagccccccaagtagctgggattacagatgtgtgccaccacacccggctaatttttgtatttttagtagagacaggttttcaccatgttggccaggctggtctcaaactcctggcctcaagtgatctgcccaccgcggcctctcaaagtgctgggattacaggtgtgagccactgcacatggtctatatgcctgtttttatataagtaccatgctgttttggtgactacggtcttatgatatagtttgaagtcggataatgtaatgcctccagatttgttctttttgcttagtcttgctttgactatgtgggctcttttttggttccattcacgttaactttaggattgttttttcttgttctgtgaagacctagaacttttttataaggactaatcctattcatgaggtctctaccttcatgacctaatcaccttccaaaggtcccatttcttcacaccatcaactgaggggtcagtattccaacatatgaatttggtgaacacagatattctagccatcatagtgtcctaactaaaaaaaaatttaaacctaatgttaagattttctcttgtattttcttctatatatttaatagttttaacttttttttttttttttttagacggagtctcactctgtcacccaggctggagtgcagtggtgtgatcttggctcactgcaagctccgcctcccaggtcatgccattctcctgcctcagccttccgagtagctgggactacaggtgcccaccaccatgcccggctaattttttttttttgtatttttagtagagacagggtttcaccatgttagccaggatggtctccatctcctgaccttgtgatccgcctgcctcagcctcccaaagtgctgggattataggcatgagccaccgtgcccggccaatagttttaacttttaagtttaggtctataaacatacattttgagttattttgtatatggtgtraggtgagggtccagatttattatttactggatgataatcaattgaccttgtaccatttgtttaaaagactatccattactcatggaattaacttggcacctttgcgtacataatatatagtcaattacatagcataaaaatgagaaaatatgtgcaagacctgcacactgk

SEQ ID NO: 95572 - DNA, 52895 bp, Homo sapiens
  misc_feature (1)...(52895): n = A,T,C or G
aaatagaaggactcttgcaccatgagaggattctattttatagcacctagaaagatggttttccaacctctatttatcctagtgccagggaatttcttctcataaatgattcattgatagctctcatgtttgaaaaggttatgccttttaaatcaaagtctataaccctttgatttctaccattttgtcttggttttgtcttctgaaacaaagtcctgtttaaaattgagaagtgttgtatgtgaagacactaataaaaggaacaccaatatttaaatgtttctccttaccctttttttttggttagtgtttgaactttatggcttttctttctggaggacaagattgagaaaagtctttttattatttacattttagtaaacagtaaccatctagagttcgtcgagtggcaagaattttgaagtttggctgcccttgtgtactactggtagattttgtggaagttgctatttactgtttgtttcttatttatcagaaaatattgaggagatagcagccaatatgagctaattcagatttgtaaagtccttagtgtcctgaaatagttaacatatttcttaatctaaagcaagtctcccaatatacttaaagaagggtcctgaaatagttaacatatttcttaatctaaagcaagtcccccaggacacttaaagaagtgtagattaactttttaaatatgtttgaggacatgatgaagcatactaaatacatatttaaccaatgcctcccattttcactttctaataattttatgatagtttgtaattgttttgtttggaattagtgatgaatggaaatcacttaaaaaaacgttaacttgagaagtcatatctgcttaggtggctttcctgcagtgttttcatccatcaaagatgtttatttgtgaagtgaaagataaagaaatttacttcagaagactgagtgcgtggtttagatgattattaatagagggaagtagataaaaggttaagcgacctgaagagagaaaaaaaaatgagccagaaaaagatgagaacacgtacagcattttggcatcatggcatgttagatctgaaaggaaccccggccgcctgctaaaactcttgatcagctctgtaatacctgcaacagacagaagactggatagcttcagtgatggcagatccgctgtttcgtatcagtttgttccattggtggctgcttgtgttatcatctcatgctttcattcactaaaaatgttttctacattcattctccaccattcctggttcttccttctggagctacataaataaatctgaatttctagttttctttaacatttgaccctccttcatgtatcttaatggcttcttaacctacttccctctctaacagtgcatacaagttcatactaaactgattcgtttcttctatttcacatgtaatatggattctaaaccctttatctctgctcttaacatactcccattcattgggccctcttaaaatatagtgcctggaattaaaagtaccattctgctgtgtcatctctatggtgcagaggattgtttttcttcactcttctattaatctctaataggaatgcatatgttttgttcctgttactttggtgtagattttatagatcaatctgagggcttatttttaagtcatccaggatctctactttgcatctgatattcatttggcactaatgtgaaagaacacccatttgtataccaccatgtgggagagaagggacaggtcaaaatgcagagactggcaaggctgctgtgtcaatgagacacagtaactttgcctctaagtgagacgaagattgtccccttaattttgataggcagaatttgacttatttttatttcattgatctcttttttgttttagttgctttataagtgagttggagaatataattaaaaccagtctcccagactccacagaaccagaaacatgcattcacttaaagagggagaatgaagaaaagataaggattgttggtgttcccaagcgtaaggggctaaatgggtccaggaacttagaggctttcctgaattccatgtttstggcatgttatagttaaccctttgattatcagcaaatactttagccaggcttaatcacagagagccagaatcatctacgtctctgactcctggggcgggggtgtagaggatgacctactgggaagttagaaaatgcttcaaaacaaaaccaagaaaaggtttctagcaatttcgtgattttattaagagctatactataaagtttctagcttcagtcatggagaatagttgacaacagatggaattcccattctgaagtcctgactgacagcccagagatttttagattatgcttctttatctttttagtagtatgcttacaggggtcttcctctgaataaaatggctaggaaagtaggaccaaaaaaaggaagttaaaaaaatatatcaaacttacgatactgttttctacaagagactgggaaagtaatttttctaaaagtgtagcatactgattcagagcttgagtgagtctacctagtttcacatctctgctgctttatttcactagtcttggttagcttacttagatgttctgtgctttgtttccccgtctataaaaggagatagtaatagggttgttgagaggattcaatgagttaatacaaataaggctcttagacagaacctgtgcagaattaccttctgagttaaagctatcagcctgttgggctggagttttgccagaaatgtatttaaactcattgaaaccaggaaggaatcaaacaattctcagtayttttccagctaacctcctagactattttctaaaaatataatcatctcctccctcccaaaaaagattatgggcactcttatgtgagttagaactttggatctcctctgtttcattcatttatattttttattcagtaagtgatcaggggaaaaatatctaataaggcaaataatgttaacaaatacttttgatacaatggaatttgttgttaatataacataagtcaatacctcagtggccatggttgaaagggaaagaaaataattatgccttctaaattacaggtactaagtttatctgttaaccttattaatagaaaaataccattgttcagaatttctgtcgcaggtattttcatcaagacacacacacacacacacacacacacggttatgaaacagtgaaaatagaaaatggaagccagaagagaatcatatatgatttattgccaaattttttctacatttttcctcagattgccaactctagccataacaaaatttcatagatcttaatttttttaatattttgtaatgtttttcaactgttttaaagaagaaaaactttcatattatttagaggaaaatcaggtttcaaactatgttatccaattttaatttaaatatgtatatttacatgtttgaataaaggaggatcaataccaagaatgttaacagtaggcatctgtttctgactttcgagatttggggtggtttcggtttttgaatagttacctatattttcacttttgtccgcagtgaacaacttgtcattaaaataataaataagggaatgtctttttatattgtagatgtgaaaaacccttgacacgattgcatgtcacttacgaaggtaccatagaagaaaatggccnaggcatgctacaggtaggtgaatcttagtagtgtctgtgtatggttaggactttttcttgtcaagcttctgacagcaaaagaaatttgaaaaactgtttatttgtctcctaaactgatttaatgcaaagaagcatgatagcagaatgaagaaaaacaccaaacagatcactttgacagccttggtaatgttgtgatttgccagtgtatactctctgtttcttatatgtgcttctctaaaaagcctttgacagaaaatcccaagatctggacagcatcagcctcttggttcagacattgatagtaggttgacagtggaggaagttcccagggtatagtcttgacagactgtcaccaggcatttttattctttttccttaaaggctcttcttgctctgccccagttgatgaccagatggagatgtttttctgccaccaacagctttgtttaggttgagggggcagacrtctaaaactgattgataagaaaggcctctctctcatatgtaacagtttcacgcacgtgagctagctgtttgctatgtcttttccctgttaaaagcaggtaattctggtccacttctcaatctttgttaataatctgttaccgcctttacctttaaaaagtatttttggagaagggggttaacaaaagccccgtgtttaaaatatagtaatatctaacctaatcttttgatttataatgcttctttaamattcactaatgttagtgttttgtgttcttatcccatttataagagcattgtaaactgagttttctttgaaagaagcttgtataccatctcatttatactgataatagtttatttttcttcttagattcttatttggtgcttatattggttcagaatctaaagaaagcagttgcctgaaaatggactgatttgtttgaataacttaatgctcactataaratttacgtctagttattatttaaatgaaactgagattcttttttaaatggccttttatttggacatatttgtaattaaaatcttcaaagagacaaactatgttttattctaaatcaccttctcccagtggttatttgagcttataaacaaaaacaaaacatatttaaatttgcatttactcctataccttttttctgtttaaaaaataatcttaaaatatgcttaaatattggttcaaattagtatcactttttcccccacattcccctcttgatgaagttctttccatctttaaagtcttggataaactgagagattcttaatacacatgaactaaacaaagttactgctagttagcaccacaggaatgctgacctttcattacaatacaattcaacaaggaattatttaacaacagttaaggttgagatcctccccacttcctyggaatatattatagatggaaatgtgagacctcggtagattagagaataccgtaagggcttcttkctattaattgttctccctacccatgccatgtctccgcaggagatcggggaatattgtattgcaatgctacagagctccttgtgtagcatataaattacatgatgctgaatggcmacaacaacaaaacctctctgaggagctttatcattcctgtcttttcatcaagttataattcagaagctgagtaatctgaatgagtagctttaaagtgacttggaaaataactggctaaaaataaggatgcattcacattcttgttttcatgtactggaacaggtytctcaactgttgtagagggtctttattgttaagaacttttttaagtagtaaaactttggttttctaaaagactytggcatttagaggcatactgagtttagtgtctttatttctgtgyacacctttcaagttaaaaatgtgggccttttattcaaagagtaaacaataacatacacattgaatgtatttcatcatcattatcaagtagtacataagttggatagagcttatctttttatttttgttatgtaccttattccagtaaaaattaagttaggccaatcttaaacctcrtctgtttctcatttgtagtcacaatatcattatacttttaggcactcagccagtctcttagttctcaagtacagtccattttatttctttaccgagtttcttctctttcctttactttaccactttcctgtttgaggccctagtagtgcctgtataaactatttagtactcacctaaccagcatttttacttttagttttacagttttccatttattctttaaactctagcctgaattatcttcctaaaacataggtccaggtgttacttgaatctttcccagaaccttcagagggaaattgagtaaaaattccctagacctcagaccacctcatcaccaactgtaagcctccacctactctacactgcaggcaagcacaatgaatctgtttaccattcccctcatayagtgatttacatttgttttttttttttgccctgtgtccttgtgcagctatgccctcagcctgcatgtcagctgccacatccccttgtaaagctttcctatcttcctcccatgctccaattttagttaattgtattattagaaagtatcaaatacatagtaacaagctcttcaataatcatcttctcattctgcttatgctcattctgactgccatctaaattrcaaatgccgtgaggccaggaaccatacataycttattcatctttgtatccagtgattcccagcacaatactcagtaaatakttgttgaattggacagtttaagccatgaatcacccagtgcccatagacctcatatgtagtaggtagctaattctaatcaacagactggtttcaccaaaattattttcctatttaagctaaagagttactctggttttttagcattggttttagtactccagaacacaaatccaaatatatgattctctctggtagctcaattgaagaactcctcagtggtatgttttagtattttctaagttctcctgtggtaaaagaagactgcttcgccttctattaatttctgtcttttgacatatatttttacatatcaaacgattcatactattgttttactattttgtaaaataggcttcagattgtcatttagtatcagttgctttagagaacactgaagttttaagaaatcgtatattttaaaatagtttgaaagaatataagcctcatggtatttagtaaatcctattttacttgtgtgtatgactatgtatatacacaagttgtgtgtgtgtgtgtgtgtgtgtgtgtgtgtgtgtgtgtgatctaactcctcagatagtctcactaaggaaaagatggttgctatttcttacatactgcttcatgaggctggcatagtgctggacacactggacaaacggaaataatgccagcaagttgagtttgctttctctggaggattgtgtaattcttctttattagtaggcatttggggatcccatcatactactccacataaagcttaagagtttccaacctaattggaaatattactttaattgaatctttgttgctatactgggttttctttcttccttttttccttagttatatttttaaaaagtagtttgtaatgttcatgtagtttggggtttggggttgaatttagaaggacaaaaattcgatctctttattcttacaataaagttggaaaaggttacccaaaaagttgattactaaacttttcagttctttagggcaagtgtttggttaccatattacataagaaaagtttaattatattaaagtcacgtgaaatacataaagggaagttgagtagtgaatgggggagaatgactttgaaaccttcccagataaagacctcccttgatttgtggcccatgagacacaaataggtttataaacaagagtctgtatgatwcataatattttgcctaaaagctccattttccagattgcttctctggttctgggatccagaaaaatgtgcagagatgttaactgcagtgaggtggaaagagcttaagcaaccaaaatctgcccttcctgggaagattacttatttggggattgattttcatgggagaggaaaagatgagagcttagagactatgtgcttcttgatcatatgtgtaggtatttttgaccattatttaatgtcacatttccccaacaggtggattttgcaaatcrttttgttggaggtggtgtaaccagtgcaggacttgtgcaagaagaaatccgctttttaatcaatcctgagttgattatttcacggctcttcactgaggtgctggatcacaatgaatgtctaattatcacaggttagttttgggaagcctggaaaatggggtagtcttccccatctgtgaatatctgtcatgaagactagagactacccagtatagcttttatcttccatgggcatcagtcccaatatttttatccattaatttatacttagtttttgaaattattacagccttattttcctaatcttaagtaagacatcttatttttaccttttctttctttcgtggcatctttatctgaggaacagggattaaaaactattcagttaccccacagtttgaatttttttttttttttttttttttttgagacagaggtttgctgttgttgcccaggctggagtgcaatggtgcaatctcggctcaccgaaacctcctcctcccaggttcaagcgattctcctgcctcagcctcccgagtagctgggattacaggcatgcgtcaccacacccggctaattttgtatttttagtagagacagggtttctccatattggtcaggctggtctcgaactcctgacctcaggtgatccgcccgcctcggcctcccaaagtgctgggattacaggygtgagccaccacgcttggcagtttgaaattttatgacataataatgctcttaagaagaacatagtgatatgcctctagtatgtattctgttgtaattcttccatttgagagtgatttgtttctattaaaaataattttcaagtggtttcttgtactttagtatgaagacattgtgtaaatataagaagcayaggaacagtatttagagaaatcagtaaccttttgtttaccctattttgaatcctaaaagaaaaagttcagttatcatggccaggcgcgatagttcakgcctgtaatcctagcgctttgggaggccaaggcagacagatggcctgaggtcaggagttcaagaccagcctggccaacatgaygaaaccccgtctctactaaaaatacaaaaattagccaggcacggtggcgggtgcctgtaatcccagctactcaggaggctgaggcaggataatcacttgaacccgggaggcagaggttgcagtgagctgagatcgcgccactgtactgcagcctgggcgacagagcaagactccatctcaaaaaaaaaaaagtctgattatcttggtgtttcttcttgtycttcttgatttctttacgctaatatgggaggaggaggggggaaatttagtcacgtgtatgctttaggtctgttatagagatttaatttttttttgtttcttcagactgagatcactatgtaacagtattttctttgaataagctatcaagaaaaatgatgattacctcatatctcttaagaaactcttaatcaggcaccatatgtaagttgagtcttttattcaagtacgtaaaagaatattcccacataagtgccgttaatgcaccatgagttgctggtactatttttttttcctgaaaaagtggattttttatttccacttagaatctgttactgcttggagatgagtttcggggtctaaacactcacctgggttgtagaatttagtttattgttattcccaaaaattataataggagaaaaaccytccccatgagttatataaaatgtgtacccaaccgcattacctccaaagacatacatgacaaaaccgactccaaagtctaatcttgaagccacactgtgcctcagatagatttgtagacaaccttcagaagagtatattttcttatgttttgcttttaagattctctttgactttcaatggtttgaatatggtgtgtctacatgcagatctctttgactttatcctacttgaagttttttgaacctctctaatgtttgttatatttggtaaatgttgggccattatttcttcaaatgtttgttcttcccctttcctcatcttctgggactcccaaattacgtgtttgttgattcacttgatgttccacaggtctcagaagctctgtttatttttcttcattctttattcttcttgttcctgaggctcagtctcaattgccctgtcttcaagttcactggttgttttttctgcttgctctaaactgcttttaatctcactggtgaattttttatttcagttattgtacttttcaattacaaatttctgtttattttttataatttctatccctttatttattaatattctctatttgagaggcatcattcttatactttagttttttagacatagttttctttagttgtttcagtatattttaaatagctsatgtaaattctttgtctactaagtccaacatctgggctcctcaggggcagttactactgactgctttttttttgagtatgggccatactttctcatttctttccatgtcttctaattttcatttaaaactggacatttaaaataatgtaatgtgaccctggaaatcagattttckcttttcatcacagttcatccttcttgctgttttttcaatgacttttctaaactaattttgtgatgtctgtgttctttctgtgtgtggccagtgaagtccctgcttgttagattagtagtcagctaatgcttgaacagatttccttagatgcctgaaactaataagtctcaaygaagtctaatagtctttgttgaagggctgtatgtgcaggtgcagcctaccttcaacactgcactaagcagttgatgcctctgccttagccttcacttcctgtcaaggtcaggcagaggagagagctgagggctttctctagtttttcctgagcattcatatggccatgggcacgcatgagccctctagattccttcttgttttaatatattagaacttttcaaagccctttgtggacattctcattcttcaryttttcctttgaagcttttggttagcctattgtttgccccagctgtttgccaccacctcaagaagtttcagtgttaaacaatccctgtaattgttttcatcaaaccctcaaaagaattaygcttttcctactggccaagctccaagtcctgtaaagtaaagacagccttctgagcggggccctccaggggaccaccagacaggtcaaataatgacagttctctgagaattgggctttgaaggagcttcagctttcttttgccccctctgatggcttctgattttcactgtgattcaggaaggttagtttttaaggccgagatggagcttgggagagtgggatgggaataaggcaaataaaacactgcaaagtttattgtttttaccaagattcagctggtttttcttgaataagcactccctggattgctgcaagcctttggctacttttcagttgattctcacagtgctcatcacagtgttcacattgctttcatggaggagagagttttcagaggtttttactgcaccattttttactgatatctttttatcttttgtaagcacccrtggataaaggagctttcaatgagttattctacatcatttagacatcctatgtaaatttttatccctgtgattctgcttttttggtgaagtaaggcaaaaaataaaaaattgtaaattgtctgagtttatgtaggaaattaagattggaacttccrcaaaggaatttttttcctggacagagcctcagtcagccatttgaagttagtgacttggagtactgcattcagaattctgagattatgatccaaattatactgaaatggaaagataaactccttttgtactcaacacttcctcaactcacattttggccatctgtctgcatttgttagttatcatggatgcacgtgggargtatataattgggcaaggtactaggggagataagattgcaaggaattacagaacaaaaaaaactggcataaatctattgttgagcaaccagcactttggctattggtctcatactattgtagggaagctctgcaggtttggaatatggctgtcttcatcatttacgtacatcaaataatactttaaaagattgttattccggctgggtgcagtggctcacgcctgtaatcccagcactttgggaggctgaggcgggcggatcatgaggtcaggagattgagaccatcctggctaacgtggtgaaaccccrtctctactaaamatacaaaaaaaaattagctgggcctggtggcaggtgcctgtagtcccagctacttgggaggctgaggcaggagaatggcgtgaacccaggaggcggagcttgcagtgagccgagatcrcaccactgtgctccagcctgggcaacagagcgagactgtctcaaaaaaaaaaaaaaaaaaattttttttttagctsttaaggtagatttggattgaacactgagaacaaaatatcccatcagtttttaagatgaatttacattcttgaaataaaaaacttggtaaaatgcatttaaacttaaagctaacttgtttcatttgcttaatttctctagaaagtagtaagaactgggctgggcgaggtggctcacccctgtaatcccagcactttgggaggccgaggcagggggcatcacaaggtcaggagattgagaccatcctggctaacacggtgaaaccccatctctactaaaaatacaaaaaattagccaggcatggtggtgtgtgcccgtagtcccagctactcaggaggctgaggtgggagaatcttttgaacgtgggaggcagaggttacagtgagccgggattgtgccactgcactccagcctgagtgacagagtgagactccgtctcaaaaaaaagaaaagaagaagaagaagaagaaagtagccagtacattgtcatcctccattaatgttaatgtaaataaaggatgtcattttccttgggaataaaacaggaatgttaaaaggaaaacataagaatattttctttttttaaagataatttgtccccagtctaaaaaaggattctaatctccttttacgtaatctctaaacgttcctgcagctattgtaaaatgaatggaaaattgcagatccatgactcaccttcagatctgtaattacctcaggctaaggacatatggggtgacttttaactcagcattttccccccacatccacttaactttattatagtgcctcctaattaatatctgtgatgtgatgttaccttaatggaaatggccatttcatcatctatttgatgtctggatttctgccatctccctccttaggagactcttagccatgcactrcaatctatctgcctgatcaattcygttccttcaatgatgcatccagctcagtgagctaatggctgtgactgtgctgcctgaatctgtagaagagtttgagaaattggaaataaattaaatttatcatcattgtgggacatctggttggtatcattattttaaaagaatatgaaacaggtcatgcaaacaggcaaatacttttatacagacagtgttatccctctgtttgttgtgatcctgcctggggcagccatgagttaaaaacctttcagtaagtatagatagagggaaagagttaaaattccaatcttcccatttcttyttttttttttttttttttgtcttctcttacttgtttctgtacaacatccagaaaatagtttcaatactaaagggtgttaagttttctgagagttgtttttctgcttctgtttggtgagcacataaaccaggtgcctagacatgaaacctactgggcagagtattcctgtatttaacgtaaaacctgcctctagtgaatcagattatcccagacatcacaaatctttacatcttttccaaatgtcagcagagctgatagaaatgataacaagtagacaccattgcttatagkactggtgacatcttctagagttaaagtactagaggtgcctgtcaagacaccagctcattgggaaaggtccaaattcagttggagttttccaaaaatgtttggaaattaaacgtttttatgcttgtcttttctaagtttttaataatcattagaattaaaagcaagagttttctatttactgcataatcactactgtttgagtgatgctaataaaatttgggtaaaatggtgtttatataaacctgctttccaagggaacaatccattggtaagtagaattttttttaatctccgaatgttttttcccatgatcgttacaaactcttattcctaataagggaaaataaccatgtttcttactactaaatctaaaaaatcatgaagaggtcatgaaytcctcataagattttaatggattccttctagttttttccttaagtgaaggtctttgactatgaagtcttaaaggcccatccctagtgagagctatcacaawggtcattcagtcttctgtctcagtagctgttaccagtttacctttatattttcatcatagttcattaatttaaattttaaacaagttaagggcattcacttttttcgaaggagacagttggcatgttaaaaggtgtctacttagaaaacccagggtttaacttgtttagtacaaaagtgtttgtatgtgtattttttatttcccatgaaggagggaaggaagtaaatctaaccttgttcctctcagagaagaacactgaaactatattaacatgaagtagaaacatgataattgatatkttatatttttcagccactttcttttaaaaagacagaacaagtatttgttttccgagttaacagatcagaataggcagtttgtctttttatgaacaggaaaaacgaggcttgtctaccgctaggcagaaaacaaaagaaggagtagtccttgctgtcttggttcctatcaggcaagtagaccaggttgcttttcaccctcgagtaaatagaatcacgyatctgtggtttctctacccccttaaaaaawttatttctaatgacaccaatactgatggctttgtgggtttgaatgaattttttacttgtcttatttagtttcccaaggaattctatgatgtaaacaaaataagaattattaagaaccctgaatttcagatgatggaatgatgtccagtgaggtttggttatctaaggtcacctagctagtgaagatccactttgagtttctcacgtttcctaatctcagtgcagtgctctttttaccataccatgcatttattgtagatgtgaatttttagtatgcgtcagttatgtagtgccttcggattatttctggactcattgttttaatcatcagttaaatttctttggctcattaattattatgtttattcggcaagttcttactcaactgcttttatattcttgcattacaagatgctaatgtagataaaaatattatttattttttctttttttagacacaggatctctgtcacccaggctagggtacagtggcacaatcmtagctcacygttaccycaaattcctgagctcaagggatcctcccacctcaaactcctgagtagcaggaactgcaggctcacaccactgcacccacctaacttttttttttaattttcagtggagacaaggtctcattctgttgcccaggctggtctcaaactcctgggctcaggcagtcctcctgcctcggcctctcaaagtgctgggcttacmggcatgagccaacacaccccgcctataatttataatccctgcccttgaggagctgagagtctagtgagggagtcagattccatttcttaagacagatttattgaggtataattgacataaaataaactatttgtttaaagtatacaattatgtaagtttggacgtatgactacacccatgaagctatsttttgtttaagttttcattgttttttgttttaattgagttttgaaagctttatatattttggatataaatcctttatcagatatttctagcatgtcttttcattctcttcacagtgacttttgaagcacagaagttttaagttttgaagtaagcttattaatgtgttgttttctttcttcctgttttggttgctatakctttataataagtcttaaaatcaggtagtatgggtccttcaacttttttctccttcagmgtcrttttgccaagttttagaatcagtatttcaatgtttaccaaaacagcttgctgaattttgagaatgctttgaatctgtagatctgtttggggagaattgactttttttttgagacggagtttcgctcttgttgcccaggatggagtgcaatggcgtgatctcagcttaccgcaacctctgcctcccaggttcaagcgattctcctgcctcagcctccctwgtagctgggattacaggcatgtgccaccatgccyggctaattttgtatttttagtagagacggggtttctccatgttggtcaggctgctcgcgaactcccgacctcaggtgatccgcccacctcggaattgacatcttaacaatgttttgtctttgacacatgtctaggatgtatgtctctgtttattcatgtcagttttactcactagtattttatattagtattttatggttttcattgtataattcttccccattttgtcagatttatccgtaagcatttcataattttgttgctgttgtaagtttttaaaatttctgtttttaattattcattgctactatgtggaaatgcaattgattttcagattacaattcaatatgytaagtgctctaccaatgttatgtgcaaaataccttgggagcatggaggaagaacaatcaaccctacttatggtgtcaaggaatgcttcataaaagaaataacataaatyttctagttattttcttgatttttagcatgaatatcttgtccaaaattctagataaatgtctaataattaaaatacaaattatttttagaagtagtatattaaataatagactggaaactctagtattgagtttaaatcttggaacttttgattctggaaatttttaatcatatatgaaaatagagtattttcatagctttatttatattatgtggtttttattgtgtgtttttctgtttgttttgagacagagtctcactctgtcaccaggctggagtgcagtggcrcaatctcagcttactgcaacctccaccctccaggttcaagtgagtcccctgcctcagcctcctgagtagctgggactacaggtgcacgccaccacgcccagmtaatttttgtatttttagtagagatggggtttcaccacgttggccacgatggtctcgatctcttgaccttgtgatccgcccgcctcgacctcccaaagcgctgggattacaggcatgagccaccccgcctggccttatattacgtgtttttatgtgtatgtatatgaaayttcagacttacagaaaagttgcaggtataatacatggaatttccatatactctttactcagattcacagaaaagttgtaagaataatacatggaatttccatatactctttactcagattcaccagtttacatttttgtcccatctacttcatcattttctctattttcttttcttgaattgttyaggaatatgttggagatactgtgcccttttatccctaaatactttgttgtatatttcctaagaactaggacattgtcttacatcagcacagcacagttagttatcaaaatcaggaaatttaatttgatacagtactgttagttaatctayattataatataattttgttattccaattatgacctttgtagctttctttccagtcttcaattagtccaggctcayaccttggtattctttaaactggaaccatttctcagcttttccttgtgtttgttcactttgatatttctmaagtggataggctagttattttgtagattgtccttcttgtgtttgcccactgcttcttcctaattaggttcrggttattcatttcggtaggaatcccactgaagtgatactgtgttctatttagtatatcttttgaggagacatgtgatagcactttgtcccaatatttgtgacaccagtgtaatgacttggttaagttgggttgaccaggttcctccactgtcaggttatactttttcattctgtaattaatgtatcgctatatattttatatactttgaaactgtaaacatcttgtcctcatmaaaccttcacctactaattttagcagtcattgctaattttttaaactcccattctttctacatttagtagttggcattctactataaggaagrattttccctttttccttatttgtgtatacttatttattaatatttattatttattaatatatatgcaagtatagacacttgcattcttattgtattcagtggattatgatccattgctattttctgtttggtgctaaattgtcccatattccatcagtgggaatgccttcaagttaactattgtgtgcctttgacatgtgcccatcattctttaatgcactttcttctttgagcatctccatctttttagcacaaaaagatgttgtaggctcatcttgtatattccctgcaccagctctggaatcagccatttctgcaggtggtcctggattttagttagtttttggaagccaagatttgaactagaacatatatgttacamacacacacacacacacacacacacacatatacaactgtgaatttatattgatacctcccattcttaaccagcwtcacagcctatattatagtctttccccctttccataattggaactctcttcyccaacaatgaagaatgtggytcccaatatcttcaatttttctcrtttgtttaagcctaatatatacaaaaggtgatttcagaacttctaaaccatgccactgcaaaaagtaaacctgttaaatagagttcattayttgtttacagttcttttatttttgaagtaaaatttacacacattgaagtatacaatgttaagtggataatatggtgagttttggcaaattgatatgcttttatatcccacacccctatcaagacataaaaaaaaaaaaaacatgtctatcacctcagaaaattcccttgagccyttttctggtcagtccccaaccccagaaacaaccataatttttattcttttcattataaattacttttttcttttttttagaatgtcatgtaaatatatgtcatacacacttctgtatcttgctgcttttgcttagcgtaatgtgagatctatctatgttttttaatgtgtcagtggttctatcccttttattactaaggagtattcctttgtgtgatcgtggcaaatgttttgttaattttttatcaatagttggattgtttccacctttagttttgtgatagtctttttttttttaatgtcaacttagctaggctacagcccccagttattctgtcaaacactaattcgggtattgctgtgaaagtattttatagatgtgatcaaagtctacaagtaaaggagttaatcttattgcattcaataagcatttttttttcctttgagacaaagyctcactctgttgcccaggctggagtgcagtgatgtgaccttggctcactgcaacctctgcctcctgggttcaagtgatgcccctgcctctgcctcccargtagctgggattataggtgcctgccaccatgttcagctaatttttgtatttttagtagggacagggtttcaccatgttggctaggctggtctcgaactactgacctcgagtgatctccccacctcggcctcccaaagtgctgggattacaggcatgagccactgtgcttagccacattcaatacaatttgcattaagtaagcgataatctgggtgggcctgattcagttgggtggaaggccttaagagcagagctgaggcttctctgaagaggaaattcattctgtgcactgccacttcacccatgcctgagagttccagtgcaccctttggacctgactagtcagctccacaattgtgtaggccaatttttggcaataaatctcttcatatatatgtcctcctggttccatttctctggttgagcaatgactgatacaaatctattgtaaggaaacctgctatgaacattgttctttgcagtttttgtgagcacacattttcagtatttgtttagtagatatctaggaatggaaattgtaggtcaaaggttacgtgtatgtttaattttacaagggattgccaaactcttttccaaaattattacaccaatttatgttctcccagcaatataaaatgagatttccacttgttttccatcctcgtcaacatttagtgttgtcattcgtttttattcttttgtattttagcctctcttttgagtgtatggtggtttctcactgtgattttttttatttgcatttctctgatgactaataatgttgagcaatattttatgtggttgttagccagttgtatatcttcctgtgtgaagtttatattcaggtcttctgtccatttttctaaattgggttgtgtttttattgcagacatgtaggagttcgtcgcatattctgaacacaagtcctttgtcagatatttgatttgcaaatattttttctccagtcttgtctaaacattttcctgaaggtgttttttcattgtttgttcgtttgttttttgtttttgtttttgttttgagatggagtcttgctctgtcacccaggctggagggcagtggcatgatctcagttcaatgcaacctccgcctcccaggtctccatttaagttttctttttttttctagtgtctttttttttttttttgagatggagtcttgctctgtggcccaggctggagtgaagtgacacaatctccgctcactgcaacctctgcctcccaggttcaagcgattctcctgcctcagcctcctgagtagctgggattacaggcacacgccacaatgcccagctaatttttgtatttttattagagacggagcttcaccatgttggccaagctggtctcgaacttctgacctcaggtgatccaccagcctcggactcccaaagcgctaggattacaggcgtgagccactgcgcctggccagtagtgtcttctttgttgttatgtttactcctaggtattttatggtttttgacattatgggtaatggatttttaaaaaatgtttattttcccattgtttgttgctagtacacagacatacccttgatctaagtttacttatatgctttttctttattttaatttcccctttcttttcttttcttttttttcttttgagactgaatctcgctctgtctcccatgctggagtgcagtggcacactcttggctcactgcaacctccgcctcccaggttcaagcagttctcctgcctcagcccccctagtagctgggattaaaggcacacaccaccaagcctggctaatttttacatttttagcagaggtggggtttcaccatgttggccaggctggtcttgaacttctgactttaggtaatccacccgcctctgggattacaggcatgagccactgcgcctggcctctctctttagttcagtgattccttaggatttgctatgtaaacaagcatgatatctacaaatagggacagtttgacttatttttttacattctttatgcctttttgtttattttcttgccttattgcactggctggagagaccttcagtacagtgctaaacagaagttattcttgccatgttatgaaaggtggaatgtttttgccatcaagtgtgaagttaatagtgacagattgtttgtttcaggtactgagcagtacagtgaatacacaggctatgctgagacatatcgttggtcccggagccacgaagatgggagtgaaaggtgagtctgtttctgtcttcagtattccatggctaaaagcaaaggaatttgggcttgaccctcacacactctcattctgtctacttgtatttcagcaagtgaacttaaaaagaaaaaagaaaagaaatcagcattacaggttcattggcattgaaaacactattaccatcttcctgtaccaaagggaagaacagagaagataaaaccaaaagtctaaagcaaagacaaagaggggcagaattctctacagttctttacctctgagctacartcagaaaccgtggaggttaaattccatgtttaaatctgagtagaataggttctaattagagcttaaagcctttgaccaacttattaagttatctttaatttttctgtgaaattaggtggaggaaacctatgttgcgacagttgacctaatgccacaaaccagttgatggcagaacctgcggtgtgctttgctgctttgtctcctatatcttcttgaaatatagtcttctastttgacattcttacttctagttaaccagagataaaattttgcagaaatgctacctgaaagcttgtggggttttttgttttgttttgttttgtttgttatttgatgagaaaaccattgtggcagaaagaatcagctcttgcccacgtgccacaaatttattcctcataatgtctcaagtccatcctctgctttcttgctattttgtttaaaatatatggttgcaacaaacatctatgtagatgtttattctacattatttacaattatttacaaaccagcatgaagatttctattgttggttttcagtttgaaaagttgcttggcacagcaatatatgcaagtttataaagagattaaatatttgggattttacatgtttccaaaattatcatctcaaccagtcctttctatttccacaggcaacatggtattgtctgctttgatgtctttgttattttaaaaatagtttctcacagtcagcaattgagcacagtaggtagaatgctgcactgaattatttcacatttttgtaacacttcttaggattatttcctggacagtatatagtgatgttacaaccccagtgatttaaagcagatctctcaaagcaaaggaggaatgagctttgtcaggatgcaagtggcatgtccttagtattagaggaaaacaaagaactagattccttttgtttgcccccaaatcctttaacctctgagacttactataaatgatttacctgtttacactatgtcattgtgttgtctctgggtaatttttcattttactttttaaagcctgacagtgcacactgtatatgcctcaatctaaaaataaagggtgtttcctttcctttccttttgctcagacctgcagacactggtttgtttttaatattttaacagagctaaagtcttggcaacctgacccctgagaggattttatttgagcgactacctgttccttatcttttctcccctttccttcctgtcccagggacgactggcagcggcgctgcactgagatcgttgccatygatgctcttcacttcagacgctacctcgatcagtttgtgcctgagaaaatgagacgcgagctgaacaaggccagtaaccttatttcttagttcatctggcagctgtcatctatttrctgccattttattaatgctgaaattaatgctttctggtaattattgcagtgtcagtatgtctgcccacagctctcctgatttaatggctctgtcagcttgtacaagatgtactttccattttgtaattgtttgattcgcagctaaggttgccagataggctgttgcttagttttaaaccccacacatgcatttatctcatcaagtaccttagctgctatgggacattatcaatgtaaaaccatatagaaacaaatgagctctgaaaatttttttctcagacctgcttaatgacattttctctacaaagtwtgctwtcagggttaaaacagaaaaactgaaaaagccaaatcaaatgttgttctattttaggtaagatttatgatggtatctattattttcygtaatacttagtgccgcctactatattcatttttttcttttttattacagaaatataaaaatgaaccatacctgttgttcaaattttcagtattggcaaccataataaataaactctgttacacaacagagagctgattctgttctctggattttgggctttcccaaaacagcagagattttctttttagttcctcgaattattcactcagcagagattttcttttttttctttttttctttttttttgagatggagtttcgcttttgtggcccaggctggagtgcaatggcatgatcttggctcactgcaacctccgcctcccaggttcaagcgattctcctgcctcagcctcccaagtaactgagattacaagcgcctgccaccacgcccagctaatttttatatttttagtagagatggggtttcaccatgttggccaggctggtctcgaactcctgacctcaggcgatcctgcccgccacagcctcccaaagtattgggattacaggcatgagccaytgtgcccagcctagagattttctttagttccacaaattattcacacagccaagaagactgacccaattctgaaaatcattctttcactcccatgagtaggatttagttataagattattaggataatgaggcttgtggtttttacatggctatacatggtgtgccagttcctacacagacttctgagaataataacagtgatctagacagatttttactacacttacaacttagtagatattttgaacataattaagtatcttatatcctgatctatttgggagaatctaatttattgttgaacatgttctcgtatgtataattttttaaattattttaatgtttagagttctcaaattttataaaatgtttgaagaataatgcactattttttaaagttgaacttacgtaacaggtgtcatttatttaaaaatgaaaataaaaagtaatccctcagaaaagctatccagaaagaccggcctttggtgtatcaacagttctaaagttctctcctacctgactctgaaagtcagagatttgcctgtactgaagatttttttttttgttgtgttttttgtttttttttttttgaagcagggtctttgttgcctaggctggagtgcagtggcatgtgcgatcacagctcactgcagactctcaacttctctgggctcaggtgatcctcccatctcagcctcctgagtagctaggagtacaggtgtgcaccaccacacctggctaatttttcttttttagatacactgggtttcaccatattgcccaggccaatttcaaactcctgggctcaagtgatctcctccccgtcggcctcccaaagtgctgggattataggcatgagccacaatgccctgcctgaaaagtatcttttactagtaattggatacattttaaatgtaagcctattttcactgttccaaactcttgccttaaagcarttgtccccagtaccatgatgtttttaggatagagcatatcgagtagaataagacttgtctttaaattttcatgaggtgctacttacctaaacacgtatatgtgaatttgtcacacggtcaagaggacatttatgtaagcagtaggttgttggagagaaatatggaaaaggaaagtagaaccaaaatgtgtttagccacagttaatacatgaatacaaactgaaagcttcactattttatgaatgaactgtatactcccacatatacttttctatgagaactagatcattcacttttagaagttatcctcaattatgatcttttaagaaggtaactttgggcataagtcttttttaaaattgccaggtccagttgattctctctgcacttacttgtgtatcaccaaccttcagtttgcccatcctcaaagacaccagaaatttaaaagatatatgtgaataggttaagttagttgtaaatattggcaacatggaagaacatttatttatagaatatagagtcttaatgaggggcgttttatacaaagaatgagtcttcaagtaacctggcaacaggagttttatttcattaggagttggcggcagtcagtcacactgccttatggaagtgtctcaaaaatattttgttaaatgacttgactgataattaaataactttttttttttttttgagacggaatttcactcgttgccctggctggagtacaatggcgtggtctcagttcactgcaacttccgcctcccgggtacaagtgattctcctgcttcagcctcccaagtagctgggaccagaggcatgcaccaccacgccaggctaatttttctatttttaatggaggtggagtttcatcatgttggccagttttgtctccaactcctgacctcaggttatctgcccatctcggcctcccaaaatgctgggattacaggcgtgagccaccacgcctggcctaaataacttcttagacaatgttaatttaggtttttgaggtaaatattttagaagttacataagtacattatcttaagtcactcaatatgtcacaaaatgttatatatttcctaaatattcttcaagtgctcaataaagcctagtaagttgagtgtcaaatcaagtttgggacagatgaagccatgtgaagcagatgggttaatttttaatgtatagtgatgcagttctacattcattttcaacctgcaattattcatgtcaatatgcaataaagtctaatttataattcataaaagattcttttcagtcaaatgcaggtggagtttttttttcaaattatacagataacaatagtaaaagtaattcttgccattaaatgattgtttactctctatgaggcattctacttagtgctttaaatgcagtgtctgatttagtcctaaccactcagggaggcataactatttttcttgtctctcatttagagacagtgagttcacttcttaggaagttgagtaatttgtcgcaggccaggtcacatagctggccactgaccaaaccagggctcaaattcaggctcccctgacttcaaatctttttttttttttttttttttttttttgagacggagtttcactcttggtgcccaggctggagtgcaatggcatgatctcggctcattgcaacctccacctcccgggttcaagcgattctcctgcctcagcctcctgagtagctgggattacaggcatgcaccactactcccggcwatttttgtatttttaattagagacggggtttctccatgttggtcaggctcatcttgaactcccaacctcaggtgatccacacgcttcggcctcccaaagtgccgggattacaggcgtgaggcactgcgcccagccaaatcattttttaaaaatgtaaatcctgcacatagagactactataactaggcctcaccttctagactttttgtggttcaaacttaaatcattgagaatatttctgcttttagaatagtctcctacatgcttatgcctgaatcactcttcttttgtgatcataaacttctgctgtgagcaaggtacctgttaaatgcttttctcaatatggcttttctgtttgatatagtttttcaaggaaatttgagggttccccacctgtgagacaaggaaatacctcgagtgtaatagagcctatcaacacatggactaactttgagaaagcacctagttcagggcctggcacatgggaaggcatctgataaatatgtgttcttttattcactgatatattccaaaaaatgtgttattttaacaaggaattagttttttaattctttcactgaaaaaggaaaaagcagtaaatgattttgttaaatgtcattggcaacttaatcagaaactaatccaaacaactttaggccttctagattaaagcatttgtcccttactagttacatttacctattaaaattgacttaagaattttggttatgagcagcaggagtctcacataaactgacagcacaacttggagacaatgtttaatattttatatctcatgttttacaaacttttagagcagaagtctgtgttaaatcactttagagatgacttgcacaattctgcttgtgtgtgtgtgtgtgtgtgtatatatgcatgccagagagaaaggaggaaaagaaaaaaaaaaaacccacatttttctacgcgaaaaagtaaaaccagttttcaccgtcagaattcagtatggatctctgacctctggggacctgtttgctacttttaagcattactcaccagttaataattgaaaagccaatcctacaaagtgctttccaggcctctggaaaaggtctgctccatccaggctccacckgtcttattggacccacatcgtgacctgcaagtagagttggtttttaaagggggggaccagtctccttctatctaactcatactgtgaagcaatgtttaatcctgtgagagatcagctgggtatcattctaaaggagaattattttagggttagaaagatttatgacttcagcttgtaaaagtggcaaatagcactgcaagagaagaaacaaatcacttgtgaaaagttgtatttgccatgttaggtaggattttaggtaggattaagtaatgaatatgttttgtggagctttctgaatctgagattgaacaaggtggagagatacaaatcatccctatttacctttttaaaaattgatctgtttattgatgtttttgttattattcaccaccgtatttggaataggactgttattaaaccaaagcctgaaaacaaaaccagtcagtatttgctgctgatattcctaagaagttcagcatctgagcacttacagtcttttcataaaatatgtgtcactttacttttcgagaatgttcaaaatgtatcatttgtagtgggttttcccttaagtttcccaatatatagaatcagaataacaattaaatacataacccaatcttggattttatacatcaggaaactaagatctgcatacttctttcattttatatattgcattttagaatagcaaaaacaatgtattaatgttataattattttagggatgaagtctaatctcagctactcgagaggccgaggcaggagaatcgcttgaacccgggaggtggagtttgcagtgagctaggatcacaccactgaacccagcctgggctaaaaaaaaaaaaaaaaaaaaaaaaaaaaaargtcgtaagaaatcagagaatactaaaaacctcagaaaatcagtatcaatatccactgtgtattaagttaaagaagtatagtagattgatttcatataaatgagtaactttaggaacaataattattaaattattccagcaaatagaataatgtatttacatgataatgaaagacatcttttaagtaaaatcatgcatcacttaaagatggagatatgttctgtgaagtagtcactgtgcacatgtcactttacacaacctaagtggtatagcctgctactcacctaggctagatggtatggcctattgctcctagactacaaaccagtcgagtgtgttactatactgaatactataggcagctgtgacgcaacggtaggtatttgtgtcttaaacatagggcaggtgctatgaaaataatggtataataatcttatgggaccatcgtcacgtttgtgcttcgttgttgactgcaacatcactatgcggyacgtaactgtctatctgcttgggccttctaaaattgatattgaagccaaagatcttacttaagtgtaaaatcttatacrtcagtttgtgccagactattcccctggataccatttctttcctgggcctcattttgggcctgtagactttataccagttttgtttggtctcttttccgttttctttccttctttcctacatctttatcattaccatgtcctggttggtctctagtttttaactctaggtactaatattttcatctttcttctcaatacacccctttgcaaccttcaggactcccaaattacctttatgttcgctgtcttcttcccttcccatcaaaactcattccaagagagggttgttcattggtatcttctgcttactatcctgaggtctcagtgcttcctttttcttttcccccttctgagttgttgattagtaaaaataaattgctctgtcattgcagactgtcagggcagggtatggctagagttcaagctggctttcttttattctcgcagctttctgatgagtcttctcaagtactcttgctctgggtgggggaaaaacaaacgcatttgccaatatagagctcttgagaactcctaatgcctttcgctgtggagtgagaacttggcaactcttttaaggtctctatccttatctcatctttgtttctttaccaagggagttcaattcctactcataaaaggaaaggtcccctgattcaaggctctgccctggtctccagcacttaaggcatccttcttcctagagaagggagaagcctgggctgactttccaaagagggctcagggcagcatactactgctgtcttatttctgaccttacaaatgcttgcttcttaacagaataaaataattttgtatttaatcattataaccagttattctaatttctatgtaattttatcatttaatttttatctgattaatattttttggtggcaggggtgggggatagagttcactgtcacccaggctggagtgcagtggcaccatcatggctcactgcagcctagacctcccaggctcaagcagtcctcccacctcagcctcccaagtaggtgacaccacaggtcttgccatattgcccaggctggtctcaaactccagagctcaagtgatcctaccacttcagcctcccaaagtgctggggttacagccatgaacttttaaagatttgatctaaacactgaatgaggtttattttcagtttcatggtttgtttttatggccatttttcaagatagataattttccaggaaaattggataatattttgtactagattttgcttctaataatttaaatgtttcaaattctcaatcattaggccttagtttcactaagctatttttgcacattgaagtaaagttaacccagttatttagagacagcagtaagaaagaaactaaaaccatcctgatagtataaaacagagaaatgaactaggaatctgaggaagccttcttctctctaggcatgttagaaaattctgacatgaaacaaagcggcaaagttatgtttattcttccagagggtttgttttttcccttgttcgttaatgacacagactatctttcaagagcctattcaaaacaaatggagctctcagatttttttgacctgaaagagattttcagaagctccatgcatctgactatgcaggtaatttgtgagcgcttgtgtaagctctataccacagtgttgaataatgatctggtaccaacttataattaatatctgtcaggatttacagtctaggagggtatggaaggaatagccttgttaatccatcgagacagtctgtaaaataaatttttatacctttgtggaaacttcaaagaacaatttaatatatttctatgtgtgggtttcatagaagcatctttctttatccttggtttttctctgggaacatttgtcaagatcattcttttaattgtatttgctattatatgtaagctatattttaggcttcgtttggaacttgagaacccaggggagttttgctttgctgctgtattaagcctgttacagtctgatcacttcagaaaataagaatttagaaagaaggcagaaagaccaactagctgacagcaaagaggtggaaatcaggaactctgggatcttacacaatggtcttctcatatagaaaatgagctgttcatttaattaatayttagccagcatcttcagaatatattgtacttttctcacattactggcaagtttttaaatattctagcttaaaacagagctgtgaaactagagaatcttagagccaaaaggcatcttaaaggttatttcataaccaggtataggaatcccttctatagatagttgcttgctctttgttaagtatgtcagtagcaggaagcacatttattaatctaatctccataactgagagagagaatgctgaggaggcataatagtgaccctttgcctgatgaaaaaaatagtgattaaagccttcaaagaaaaagaaaactgttctaacaagtccctttcctggtagtttttcctagtagtttataattgggatcctattagttcttgaaatatctgctattttcatttctgtttgtttgaagtggaaaaataaattgggacctgtattagtttaagggattttatgtgcttagcattcaaacaaataaatattagaatttatcatttcttagtctcttccttgcataatcccaggtttttctctccctttctccctctttgtttttccctctattttggcccctatggaaaaaaaaaatgagaaattgaacataagcttgataatggacactgatcctagtacatcagtcagaaacactgttagtgtctaggcactcacaggctttgataattcttttatcctgcaggcttactgtggatttctccgtcctggagtttcttcagagaatctttctgcagtggccacaggaaactggggctgtggtgcctttgggggtgatgccaggttaaaaggtaagttgttgtagaaaaggataaaagcattctgcccacacaaaaaaagttagtccttcaaaccagatttctcatgtcctgtcatgagaccacaaaaatctaagagaaaaggaaaaggaatatttaacactattttcttttttcctattatgtttgaaggaattcttatttcatttaccattttccttcagaggtcgcttatcactttgatcccccagacacagtattttgttgagtattgaaagattggcaggaggagaagagcatataatgactgcgaagtttcaaacctgagttttcactttcctccactggagtgatttttatggacagttatttcacagactcattcatccaccaaatttaatagcacctctgccactttctaggcacagtggtaggctctgagatacaaagatggagaagatgtgatgcctgctttggaattcacagtccagygtatgagagagaggcagtatgagaccgatgcagtacatgggaatgagtgctgtagtggaggcccatggggctgtgggagcacagcctgggagagctgcatgaatggcacagataggaggcatctggatgtccaagaagcagaaacatttcttacgtgttattgtttgtggtaggaaattcacaaaatccgatcaacaaagctattggccatttactacattgacattttttcaaagtatcagttatagaaaataatactatatcattacttaggatgattacttttccatttcatcccaactggtctgacaccacctgggtgtactgcattgcaaatctgacactgactacctggagtaatcgcagatctcgcctattaagaacagagtccacaagactgccccyacttcagactccatccacaagtttcaggggaatccccaggccacgcacatttctgtccagctggttactattgtaggaggttcccatgtccccacctcaggttccataatttactagaatgactcacagaactcagaaaaaagtcctgtccttaccactgcagttttattataaaggagacacataaagcgaagcctagaagggaaagcagagcttctacaacccttccccttagtgtcagggcaccccactctcctggcacatcagcgtgtacaccagtcaggaggctgcactgacctttggtgaccaaagatttcattgaagtctcattctgtaggcatgattgattaaatcattggccacatgattgagctcggtctctgccctcccctgactcccggatgtgcaatctgaatcgcctcattagcagaacaaaggcaccagcactcaggaaattccaagggtgtttgaagcttttaccaggaacccaagatggcacaccagaaaaattcttttttataccacagttacaaagtaacaagcaataargcagacataaaacagccagctggccttaatagctgaactatatttagataaaattcatctctttgagaatacttgagtctgtcataatgtaactgcctttcccctcatcagtaaaatgcttcttaatatttttataaaaatgacacatttattatttttttttaatctagaaaaataccatgaagtatataaaaatcactagaattcactgtcagcatttggtgaccattcttcaggtcatctcagtagcaatgtatgtaacttgatgaagtgacaccctctattctattctccagcctcctccttttagaaagtctgcagtctcatggatagttttcaactatccatctaacaaatgtagatctactgagtactcagcatttgttagtggctacacagtattctgttgtatgcacatatgtaccataatttatttcacagattctccattcagagtttgttttcattatattataaggagtactacagtgtgtagtacaattatatatattatgtgtaattatcttcttaaggtaaattcctagaggtgagattaatgactcaaagaatacgtatacttcattttgatccttgtagatttcactctgaaaggtgatatcaattcacattgtcttcctcacatgaacagcatcaccaagacaggactttgttactatttttcatttctctaaggttcaacagttttcgtgtttattggccatttgtttgttttgtgaattgctttttcatgccttctgcccattcatctctttgggagtagtttgattttatcactggctagtaataactctttgtatattaaaaaatattaattgtttaactgttacatgttataaacatttttctgcttcttcatttatttcaaccgatcaggctgaagttactgagttagcttttatgtgttcacatttttgtggtgtgcttataaagatgtttcctgtccctttatgctaaagactttcacctacattttcttcaaattcaaagacaaaaactgcatggtgctattttcggtgtttgaggaaacctatttttcactctgggcttattgatcttacgacagatacttttttcctgtctttctcttaagtaaaatgaatgactagattcaagtcatsaatccagaagctaggtctgctgtaagccgtggtcatttgtgatagacagtttggaaagctttataaatgtgttcacttcttttccttttttctttttttctggcttaaaagcctttcagactgcagctgtgcttgctctggtgactatcaagcatagtagtctaagatttccattatataattcatttcctcaactattgagatttaaattttggagtaactgacatttccctccccttcattagcataaatattcattaaaaatttagaatgagtcataaagtccttcaatggggaattggttactaaactatgatgctaaaaaaaaaagaaattatggtacatttatgcaataaaatattatgcttcctttaaaaaccattatagaaatgtgtctgctgacagggaaagatggttttggaatattgacaaatgggagaaatacccaatgtatgccatataaaccattttaaaattaaattgtgaatataaaatatcacacacaaatttgcagttctctatgttcatctgtttacgtgccaggattaactatggttgttctctagtgggtgatastctttgttttgttttgttgggggttttttcattttttatttttagtagagatggggtttcactatgttgcctaggctggtgttgtgattacacttgtgagccaccacacttggtcagtgatgttttatactttatttttaatctgcatcttttttattgtgagcatatattgtttttgtaacaaaaaaatcttataaaaaatgttcatggtgggtaacatgggcaggtataaatccttaaacttgtatttctttaattattaatagaaataaggctaagctgagcacaatggtatgcgcctatagtcccagctacttgggaggctgaggtgggaggaatgtttgagccctgaagttcaaggtcagcctagtaagaccacatctcttacaaaaaaagaaaattacaaaagaaagaaggcaaatttttttttttttattttgagacggagtcttgcactgtcgcccaggctggaatgcagtggcactatctcgactcactgcaacctccacctcctgagttcaagcaattctcctccctcagcctcccgagtggctgggattacaggtgcctgccaccacgcccagctaattttttgtatttttagcagagacagggtctcaccatgttggccaagctggtctcgaactcctgacctaatgattcacctgcctcagcttccacagtgctgggattacaggcatgagccaccgtgcccggctggcaaaatatttttaacatgcttgttacttawttgtacatgagttttgtgttttaccacaattagttgtttgtttttgtaagatacagggtctcattgtgtcacccaggctagggtgcaatggcgcgatcatagctcactgcagcctcaacctcctgggctcaagggatcctcctgtttcagcctcccaagtagctgggactgcagacatgcactaccatgcccagcctcacaattagttttgaactgctttaattgtacattactttgacaactattaagagaacatttttaatatattagttcattcaatagacagtttactaacaacattcttcctcaggcagccagtggccctaagagccacaggctaggagagaagggactagggggagatggaggggctttgggcctggctccagcagcagccagtggcctcctgcatgcctgtgccaccaaaggggctccctgtggtctcctacctgacctgcatttttctgagcaccttgtggaactcatgtgaaagctttcgagccagtgcaagctctacttatttctggtgctcctaactgttccaaagtgaccccctagttcatacttggcttttaacatttcattgaagttttagctgatttattcctacccatttgtgtggtgaccacctctttctcctgttactttcaaacataaaacagttcatgtgttttatcttctcagaggggcttgtcaccctttggttgcctcaaaaactcagctctcttataaactcagaaaaagtcataattttgtagattacaacatttgggcttttctcatggttggggtagaaggagcttttttttttttttttttttttttttttttgtttaagctttctacatctcgtctcagcagagatttttgcgtggggggcttctgcctcaaatgtaccaccagaccctaggcacccgtgagaattttaggagataacttaaaattatctcactggttagtttgttaaaaattttgcttttatctcatgtctaattttattacattgtaatcaaagaatgtagataatactatttctactttttggtgtttcttgaacttctcttcatggcctaacatagtcaattattgcagacatgttggcacttgaaaaggtgtctctgaaaggtataaataagacttactcttttgctgtaagattccataccttttaggtcagactctgtccttgtgactttacttgcttattttgtgaaggaattgagtgctactttaatgttccttcttctgttgtgcttttgtaaatttctcctagcatttcctttgctgtttacttacaagttcttccaacttgccttattttgttgttgtttttgttctgttttgttttgttttaggtgcttagcagcctgaagctgtggtatttagtttctctccctagtggtaagcggaaaagagggatgaggaagggctttactggcccaatcaggaacagaaactaagaacccgtgactgtattctctcccttggacttccccgtatatgttacctgacctgtaaacaagtatgccattgccagtttactatcattaaaatgtgtcttgttgcattttttgcattttcttttctatccccattccctaccttcagtacctaaaagtgacttgcaaataaaatatgctcaatgaatttctatttaacaaatatattcagtagcttctgtgtgcctttaattaatcttgggctttgcccatttttctgtaactgtctgtctgtacctggctaattacttcggtcccttgtaagattctactccagtggtaactactccagaaagaccctccttcccttccaccagaaaagttctgtattaggattcttttggttgaaagagacactaatgtagcttataccttccacctaaaaggggactgttgcttgacgtggctgagaaaagcagggtagagttggcctcaggtatgagttgatcctagaatcaggctctccctctgtttgtgttggttcctctcctgcctgcttctttcaatataatggcctcattttcatctgtctccatcagattatctctgcctgacaggaaccaggaccaaatagttccagtcttgcaaccctgcagttgagtgacccaagaagaaaggaggactccttagttttaaaatgccacaaaaatactctaatttgaccaattgggattacttctcatcccttggaccaaattgtcatagccagggatcaagaaacacaagacacatccactaatgagatttaaaggatttctaatttatttccatgacatatgtatattaagtgaaatgtttctgagatatagaaactttttataaatttctttcagaccttatgtccatttatatcaaacttaaataatgtcttcactagttattttgtaattttggaatcaagatagttaaactccagaaagaccatttctctagaaaaagaatttagacagtgctgatatgtcattttctaccatgctgtgattggcctagactagccctttgactgagttttataggaagtgtggttagggagttggggaaagggtgacttccaaccaaaaatggaaggtaggagtatagagcattggatcaggtcacctcgtttgtctaccacaggctcctcctcactttgctttcttctgccagaacagatcacactctcttggtctctctcagccttgctcaggaagattactttcttaacatttctgtattatccttttttgtggccccagtgctgagaatggggtctggcatgataatgtgcattcaaaggtgtctggagcaagtatctatttcttacaggttgagtatcccacatctgaaaatccaaaattcaaaatgctccaaaatttaccaaaagtttttgagcgcatgatgctcaaaggtaatgctctttggagcatttcaatttcagattttcagatttgagatgctcaactgatattgcaaatattaccaaaaaaacaatgaaatccaaaaccaatctggtcccaaacatttcagatgagggatactcaacctgtgtcagcacctcagagatactgctgagttagtggacttggaaaatggctttaggaatttttttaactatctgtgagctgggatcagccaggtttaacagtcactgcattttctcttatggtttgcacagttacccttccatttattgcccttcttttaagaatgagaaaccaaggtttatagacagccaataaacctgtcccaagagagcagctagcaagtgtcagaaccaacattcaaacttggctccatcttcttaaaaaccaatatatgttcattactattgttattattagttgagaacatattgagtgcatactatgttctaggaattgtactaaatatattctttacctgtattagcacacaacaacctatttaggtaagttttcttttttgtctgtataggggcaacaactgaggcatcgagaggtaaattagcctagagtcatacagatagcaagtggtagtgccaggatgcaaaccaggattgaagcccttgtgtgcttttgttatttaatccgtattggctgcaggctctggatctggatctagatttgggagttaccattctagagatggtggctgcattcttgaagagagagtgtatttaaagcaggtgagaggaccaaagattgagccattagtaacatccatagtggaaaaggagggagtgtcaagatttaaaacagtagccagaggacaagaccaattggagaataagagttggcctcgaagagtgctgtgtggtagaaacaagaagtgaaatgcttttggtactggtgagcaaagctgagctctcagggtacccaaaatgtgagagctcacaaagtgagctcagtagaaggacatgcatagtactttcaaatctgtactattttggcctccttgacagcatgcatttaaatcgtttgaataaacaatgtaaagacattgctctggctggcatgtggtaaggtctgcttggagttgaccagggtggattgccacagcagcccagaagcagtgggcaagggcatgcattcttgagttggtggcccagtcagctccaccgctttctggctgtgtgacctgagacaaattacataaccttttgatgcctaaatttctttattttcaatatggaaataataattctcttgttgagtttttgtaaggaatcacgaggtagtatttgtaaagctcctagaacagtgttcagcatgctataagagcccagtgttagcagttgttaccaatattacatgctggtggcctcacaccacacttgtggtgtgagtatcaatcatcttacccattttgtgcttggtccatttgttgcaacaggacactatgaattgcttttcatgttattcatatttatttgtattttttcatagcttaacattgatgccaaaaagaaaattaaaaccaagctccctgcaggttaatttaagtgattattttggcacatagttgtgcttgaagttagaattcgatgtttttatatcatacttggaatcagtccacatactctaatagacttgtgatttattctcttctaacttttgatgcaagagagttcacttaaatcatgaggcataattgtgtagatttgcaaagatcttgggggtgttgtagacaaggaggcctgaagacagtgatgttttaaaataaacttttgtcagtgtttactgatgtatctaggatcgagattatctttctggaaatttcatttatgtatgtatagtctagcattcaatggagggaaaacaattataacagtgattatggatttctaaactctgacagaatcttcagggagcatctgatttaactccatggtgtagttgagaaaaatgaggcccagagagtaactggctagtcacagagctagatagctggcagaaggctgaagatagaacttggatctcctgcctgccagtcctaactagtctaacacgtgyttatggtacaatatgtactctaatagaaatgggtgtgaaatcaagaatgtaatgtgaattggttttactttttgattttctcttaatataaaataaattctataaagagataaattttaaatgttttttattaatacttcattttcacaaatggcaaatgactagagatctagtaggaaataggatgaaaaggactcttctttgggtctctgtcttttttaatagtaaatacttaaagctaaattttcattttcagtaaaaggtaagaaatggtacttcttggtggagaaagatgatgattcattcgttcccatttttatgtgtagtttaggttaattaagaaccttttgaaatagggtgtattgaaactttaatgtatggataagttggttgagcagttttaattaaaacttatctctattttgaagttaattactttcaatactctgagattaatgaggcatagtcatggcacctcccatgttgtgggtactcaataaatattagtttgggaattaggacatactttgatggtattttagggtcttacatatattatgtcatagattctttcccaaatctgggaaatactcaacgatatcaaattttactggttcaacttaaaattttttcttcctatgtaatttttaaaactttctatttaaaaataatttcaaatttataaaaataaaaatacacacctttatgtatgcatatatatgtatacacatgcacataatttttttctgaattatttgagcttaacttacatatactatgccctctttcctaaatacttcaatttgtatttaagaataaaatattatcttatataaacacattatagttattaaattcataaatgtacactgatatcttatttactctttcatctatattctcattttgtcagatgacctaataaagccctttctagcctttttcccctctagcacagggtccagggtcagctactgcatttagttgtcatgtttgttagcctccttttgaattgagaatatttccacagcctttttttgtctcttatgacattgatgtgtttaaagaatacaacgttctttgagtttgtctgctgtttccttgtgatgaggttgaggttatgcattctctgtcagaatgctgcatcagtgacactgtcaagaggcacttgatggccatctgacactactggtgatcttaattttgatcactgtgtcaggctgttgcccagtttccccactgcagagttgaggatttttttcctctcttgtaactaataagcaatctgtaggaaaacaaaggcaaaattttccctagatttggcatctgttaatgattcttgcctgacctttaccacagtggttgcaaagaaaggatgttcctattctaacaccccaaccacacttaccagttagtctttggctttctcctgtggggaagagctggcccgtctgttttttgtttcgttttgttttatccatttgagcactactttaccttctggtataacaaaatattttgaggtcatcttgtacctttcttgtccaaactatagcattaagcacttcttgagaaatctagttccatttagggggaatgatggtagagaccaagatttgggtgctgagtgtgctcattgctactgtggtgtctcccttttggyccttttagcagacagagctaggaaatatatatgtgcatacacacacatacacacacacacacacacagatacacatattttcgacatcatgagtatacaccaatgccttccatttcagtccatcctcacacagttcttttttgtcttcctccattccatttttgtgtgtccctccttccatagtgagacacctgttcccagcagcatcaacacatttattcatttgctcattcctctaatacaattcaaaatagtttcagagttgcttcacctctactactatggtaagcaaaccttgtaaaaagagttgggaatttgtttgcagttctctctttctggcctaagaccatatattatggtcttatggacttatataagtcatatattgtctttgtaagttacttgggttctttctttcttcctkttcttcttcctttcccttcaatgtggttatgttatttatttggactaaaattacgctcatttattttagtttaccttcaattgtaggtttcttcccattcccattcttagtattttaattttaatttgtaaatatgtagaatattaacatgctgtcaaaaatcaaaactgtaaaaagataccctctttggccaggcacattggcgcatgcmtgtaatccccacactttgggaggccgagacgggcagatcacttgaggtcaggagttcgagaccagcctggccaacatggtgaaaccgtgtctttactaaaaatacagaaattagccaggtatggtggcaggctcctgtaatcccagctacttgggaggctgaggcaggagaatcgcttgaacccgggaggcagaggttgcagtgagctgagatcacaccactacattccagcctgggtgacagagcaagactccatctcaaaaaatatatatatcctctttaatgttttaatttgattcccatcttcccttttatgaagtaagagatttataactagcgaaagggcatttattgtaactgtattcaattttgtggttatttaaaatcctatctattgagattgtaaggtaactaaattttcggraacatacttcaggctcagtgatttgtaactttgattcctggagatagtagatctcgattgttttttcattcttataacacaccagagagtgactgtccagtgttttcaggaactctgcagaacgggagttctgcagtggccagtggaggtgggagtgcaggagggacgcaggtgtgctccccagcccattttgagaactcctgctgtgggattaaggagaacattagaacctcccaaatgtgcctatacaaaaggccagtggctgtgtgataagacacagcaattatatcaagtaagcaaacacaaaaaattttagttccagattaatagaagcgaatataaatactaccttagtcccatggtttgcagcttcctttatttgtggttcagcaaaggtgcctgtgttggaattctatagtttgatgatattcttggcagcatgtctgaaaagccacacaactagatgatttatgtccatcctgtattcmccatttcttttttttttttttttgagatggagtcttgccctgtcacccaggctggagtgcagtggtgcgatctcggctcacctgccacctccacctcccaggttcaagcaattctcctgcttcagcctcccgagtagctgggattacagtcacctgccaccacacccggctaaattttttttttgtatttttagtagggtttcaccatgttggccaggctggtctcgaactcctggtctcaggtgatctgcctgcctcagcctcccagagtgctgggattacaggtgtgaggcaccgcgcccagccttgtgttccccatttctaataccatgtatactgggtttataaatctttaatctaggatgaagctgtggcacaccagctggtaaagagctaaaggtatctaggtggaaaatgtcatgatatagccgtgtcttttctctttrcctcagccttaatacagatattggcagctgctgcagctgagcgagatgtggtttatttcacctttggggactcagaattgatgagagacatttacagcatgcacattttccttactgaaaggaaactcactgttggtaagtaggagatactcttgacacttggtatctagatggattgtacaccattcagtgggaacacttgctaaatctggatgaatcacagtgggtacgaagaaacaaaagcatggctctaagcaggaaggacaaaccctcagaggggcagcatttgcagagtctttttgttctggcagagtttcatccacagtcttgatagggtatatcagcttactaaagtaaggtcaagaagctgaagttggtgttcatttttacttttstgtctataaaaatctaaaatgggaaagatgaatgagggtaagttcagatctgagaagccccactgtcctgtttctcagacctgccagcgctcatccagtgtgcttgctacctcaggagcaaagtgtataacgagggctgccatgacagtgcataacgagggtgcatggacagtgtaccatggatagcctgttgttatcatgagcaaagaagttgtttctttaaagagtgttaaaaatcttgtttaatttatgttgggaaagcctttcaggcatatgaaattcatgctgtattttcaaaagccaagtctgagcatatgccatttagattaagataaaactggagtgttctttctaaggttttttcwrttacatactttaatgtgcctctggtctraccttttgctctccaggagatgtgtataagctgttgctacgatactacaatgaagaatgcagaaactgttccacccctggaccagacatcaagctttatccattcatataccatgctgtcgagtcctgtgcagagaccgctgaccattcagggcaaaggayagggacctgaggagccgagcgaatagcatctcctcccacctcccaccagagacgtcctgtttgagctgtcaggtgtaatatatgaattgacttaagttaatataaatgtgtacataatccacatttgtagtcaaggacgcaatctcttccacacatgtgcagttgtcagttggtacatctaaactccctccatcctgactcacgtggacttagatatgttttgtttctattttcttctatttcagtttttcattctttgatgtttatttcttttgtccatcagatctcttgtgaaatcccatggaaggttgtgctcagcctgtcgggtctctttcttcctgcccatatattataccagttgcttctgcagcccgcagatgccagcgatgccaggaaacaagttgaaatccaggaatctctttaactgattttgctaaaaatctccctgtgagccttccactcaactcttaatatgcttgcattgtttaagtttttaaattctgaaaattaataattagggtttttttcatatgtgttgcataatgcaaacctcctaggttaaaatagtttctttatttaagatagaataatttccagaaattgtacttttgaggtatcatttttatctgtaatggtttgtctgtcttttttcctctgatcagtatttttttataccagttttggagactgsctgagatgaaaggaaatgtggaataaaaggaggttttcctgatgtggtgtaaagaaaacagattcaagagaattgaagattttttttgtttcttggtacttttttctttttaaattaggactaatgtttcttttgtggtgcttgaggcatattcatataaccaaagtttgagaactgggaacttcatgctgatttgtacatattgaagtttctctggtattcaaaggttatatagtgaatgaattttcattaataaatcactttgtcagaaactcccatatcatctatattttatatatgtatatataaacgtatgctctttaagtgtgtctatatgtgagcacataaaatctaaataaaattggactggtgggaaacaattaggtttaggcattatttgggttctgtttaacgtcctttatcacaattatgcatttttaaatctggcgacaaacataaataataatgtctttcagaggttaaagtgaaagccaaagcccatcctgtgttaaccgaaagtggagtttcatcacagaagcacttactactcagatttccaaaacaatcctaaaccaccctgttgttgttctggtttaccatcagctgtcaggaaacgctagtggcggtcaaatcctattcgtaaggcacttcagtggatggcctgacctcctgctactggcaggaaaaagacagggccttggctggtggccatcacactttttgtttatgtagagattgagaggatagtgagatttggcacctgaaggcagccacttgtcactgaagttttttaccacaataactaagatttttagtcatctctcaaatttggaagaatctgtctttagttctgttgatactaaaatctttcccattctttgctttggttgcagattcatggttgtttcatgtcctcactttttctagctccacactcgtctcctcctgtgcagcccaagactaagtgacccgttctttaaaatgtttcatgaatagggtaggttggttcttatggtagagaaatcattaatccaagtaagaagtcacccagctgggtattccaaaacacagaaagtaagactcttttgtggagagctgtgtaaacaaatggcctaactcctaacataaatgtaagatgggccagctaaatgccctttgatgacttaatgtaggagctaagagccagtcagtgactgccatccccattccactggggcctagactctaggaaagtagcactagaggttacaaagttatattctaatggaaatgttacatttccctgtagtgaatccatacaagtagggcaaaaggtgaagtttcttttattgtagctggaattatattacctcaatccaaatagtataatttcatccataaaagacaaaattagcttaacaagtgaactttacttggttatcaaagtattttaaaatatggagaccttggggataaattaatacaggaggttcttggtggtaaaaggtggagaccatcattgtggaatcttgtattttctattaaggtttgtaatagtcctacaaacttgaacataaatttttaatatttgggaaggaacattcactgaagaattgataatagactaaaaaatatagctgttatcaattaatacatgatctgtccttgaacacatattcaccattatgtaaacctcacattatttcagcttatttattccacagataccaatagacatgttttcacattgtagcatctcccaaatcaaaatacttctaaaaattggtagtatgtcggccgggcgcagtggctcacgcctgtaatcccagcactttgggaggccaaggtgggtggatcacctgaggccaggagttcgagactagcccggctaacatggtgaaaccccatctctactaaaaataaaaaattagctgggcatagtggcaggcatctgtaatcccagctacttgggaggctgaggcaggagagtcgcttgaacccaggaggtggagtttgcagtgagccgagatcatgccagtgcattccagcctgggtgacaagagcaaaactccatctcaaaaaaaaaaaaaaaagaaaagaaaagaaaagaaaactggtagtatgtgtcacaatttgcagaaatttttcctattggtacataaaattaagacacattttacaatctatggcatcttgtatttgacaaaacgtggtaatttgagtaacaactatatgccagtcactttaaagttttggagcttataattgtgaccaagatagactgaatccctgttaacgagtttatactctaccagggaacatagacaatagctacagataaatcatgattattgtaagattctgtaatattagagtggggtagtcaggaaattttttttaaaggagcatttcggacatatacaaaaataaaatagggtaatatacctgtcacttatcttcaatatttatccgttcatggctaatctcacttccacctatattcctacccatttacccatgccaaattattacaaagttcatcccagacattatattttatctgtaaatcagtatgtcttaaaaagatgaccacaggatcatcacacacacacatcaaaataatcggaaaaggacttctgattccaaaagatggaataaacatacttttctctattctttcttctaaactcatttaaaaaaccctgaacattatatataaaacaaacaagaacactttgaaagttggaaaaaagaaggcagaattgctagagaccttgggaatcaaggaataaaatagtggtgagttccctggattttcttactgccttgtatatcccatacttaataccagttactggagaacccaacaacctggaatggctgtatgtagacagaggctcaagaagagcccattctctgtagctaaaggaccaggaaagtgcaaccaaaagcaatgacacattgtctacaagacaaacacaaaaaaggaaaactaacagaattagttgccagcagacctgccctgataaaatggctaaaggaagttttttttgtttttgtttttgttttttttaaacagtgcaaaggtcttttgttgttgttgttgttacacacctattatggcatgaattagtagagaacaggttctggcagctcaggctccttcccattggttctcagaaagtgtgcttctctgagaagaacaggctggcgcctcagttaagcccaggtacctttctctttggcttcctttttttctggtcattttccttcacacttctcaagacgctatctcaacctttagagtccttactacactcagtatgcacattaatctcttgacaagagtattccccttaatttgtttacaacaatgccaatagcatggtgggtaacattgtggactcccagttttgccatgggaacatttgtgggtattccttttcaaacagttcccatactgatgtctatggtatgacttttcttgttagattcgtgtgtatgtggccaaaggaacaactgcatgttataaaaggtccagagaacatatatcaggtgcctctcctcctttttgtgtttgtcattttggtgaattattagaaaattgtggttctggctgaaatgctaaagaagttcttgaaacagaaaggaaaccatcaatgaaggaatcttggaagatcagggaggaagagtagaaacagtaaaagtatgggtaaatacaatacacctctgtgggtttcgaaattacattttttgaagcaaaatataattatgtctattggggttttcactgtatgcagagaaaataattgttataaatgtgggaaagaaaaggggcatagaggtaaggtttcggctcacacaaacaattaaaatgttgatgccagtagactatgaaaagctatacataatacaatgtagtagctagagcaaccactagaaaggctatgaaaagagatatactcaaaaaccctacagataagccaaaatggaattaaaaaaaaaaaaaagttcaattaacccacaggaagaaaaaaagagaacaaccgggaaaaaaaaatgtcagaaaaaccaaaagcttattctttgagaagatcaataaaatcagtaagtctgtaaccagactaaaaaaaaaaagtaaagatatataattattaatataaaaaatggccagtctcagtggctcatgcctgtaatcccagcactttgggaggccgaggtgggcgaatcatgaggtcaggagattgagaccatcgtggccaacgtggtgaaaccaagtctctactaaaaatataaaaattagctgggcatagtggcacgtgcctatagtcccagctacttggaaggctgaggcaggagaatcacttccgggaggtgggggttgcagagagccaagactgcaccactgcacctcagcctggtgacagagtgagaattcttctcaaaaaaaataataatagtaaatgaaagagagggcatgactacatatcccatgacattaaaagtataataaaggaatattatgaacaactgtgttcacaaatttaataagctagaagaaatggaccaattccttgaaaaacacatctgctttaaatcacataagaagaaatagagaatctattttatggctacactatgactagacctatgatttttaaagataatgaatcaataattaatgaccttgaaacagcatttgacccagatttctggtgaatcctaccaaacatttaagaaagaatttataccaattttctatgttattcagaagatagaagcagagagaatccttcttaatctctgaggtcagcattaccctaatactgaaaccagacaaagacattacaggaaaaggaaactacaggctaatatttcctatgagcatagatgtaaaaatcccatacagaatattaacaaattgaatccagaagtgtattaagataattatacacgcaaccaagtgggatttatactaggtatgtaaggctggttcaacattcaaaagtcaattaatgtaatccattacatcaacaggttaaagaagaaaaataatgtgatcatattaatagatgtagaaaaagcatttgacaaaatgcaacacacattcatgatttaaaaaaaaaaaccctttggcaaactaggaatagaaagaaaactttgaatgttaggaagatatctttggggggaaaaaagaaagaaaacttcctaaactttatcacgaacatttagaaaaagcctacaggtaacatcatacttaacggtgagaaacgtgaagctttcctgctaagatcaggaatgaggcaaggatatcccatatcaccactgttttttaacatcatactggaaatcctagctagtgcaatacaacaataaagggaaatactttgttcacagatgacatgtagaattgacaaataagaaactgataaacaattgcagcagggttgcagaatacaatggtttttgggtttgttttgttttgtttgagatggagttccactctgtcacccaggctggagtgcagtggcacaatctcagttcattgcaacttccaccttaggggctcaagggatcttcccacctcagcctgccaggtagctgggactacaggcatgcaccaccacaccyggttaattttttgtgttcttagtagagacagggttttgccgtgttggccaggatggtgtcgactcctggactcaagtgatccacctgccttggcctcccaaagtgcggggattacaagtgtgagccaccacgcctgcccaggatataatataatgtacaaaagtctattgcttttctatacaccagcaattaagtggaatttgaaattcaaagcacattaccatttacattaccccctgccaaaataaaatacttaggtgtaaatctaacaaaatatgtataagatgtatatgaagaaaactacttaacttcaatgaaagatatcaaagaactaaaccatgttcatggacaagaagactcaatattgtcaagatgtcagttttttcctacttaatctatagattcaacacattcccaattaaaatctcagcaaattatttcatggatattgatgaactaagtctaaactttatatggagagacaaaagacccagaatagccaactcagtattgaaggagaacaaagttggaagactttggcatgacgtcaaaacttactaaacaactgggtctaaaatgatgataaataaagctacagtaattcatactggcaaaaataaatagaccaatggaatagaatagaggcccagaaatagaccc

SEQ ID NO: 95573 - DNA, 108295 bp, Homo sapiens
tgtgatgaaaagctacattaatttttaaatttcatctaaaatagtaaaatggcttcatgataaaatgactgtaaatgcttctactatcttcttgtggaggaaaggcatggtgacagcagtttctgatctggctgcagagatgcctgagcccacggccaccaatatggcttacggtggccagtaccaatctgttgggggtgacacatctgggcaaaaccccaactggcactacactggccttaaaagccatagagtggggttagatgattcaactagtatttactgggaaaggaggttttcccgtggcagaaagttatgtcagttacggaagacagtattcacttagtaagccttctctttagtctcctccgtcaagcctgttgcctgcttaggcctctcgagtactgcttaggcctctcgagtaccrtcaatcataccatagagtctggatttgaaatcccacccatcaatgtttcactttgaagctttgaggaagctgatgagttctgtactcagtgttcttcacctattcctttgttcccatgcatgcgtgtgcacacaaacacctgttggtttcatcctatcattatgcacaagttcctatcagattataattgcactaccaccatcacttcctatctgtattagtttgctacagctgctgtaacaaagttccacaaactgggtggcttaaacagcaaaaatttatgtctcactgttctggaggccaaaggttcaaaattaaggtgtccacagggccgcactcacttcaaatgcaccagggaagtatctgttccatgtgcctcccctagcttttggtggtttttttggaaagctttggcattccttgactggtggcagtatagctccaatctccacgtggtgttctccctgtgttcgagcccctgtgcccaaacatccccttttaataagaacaccattcacattggattagggatctaccctactccagtattaactcaccttaactgcttacatctgcaatgaccctgtttccaaatacggtcacattctgaggtactgggggttaggactttgatgtatgaattttgaggggatacattcaacccataatattttgcacaaatcaggcacttgatgtagttcttaaaacaagagcagttggaagcagtattatcttggcaaacaagtggtagaacataacctgttttacatattttaattttttatcatgggaatgttgacacatacgcaaaaataggcccaataatataaggaaccccaggtcttcatttcctagtttcaacaattacaacccatggccaatgttgttgcatgcccctcctgtaagatagagggagattctcttacaggtatgaactacagtgtctaaaattacattcatctacattatcttctttgattttcataacaaccagaaaggtaggttatgtagttttacaataaaattcatgtctaacaaattactattttaatgtaaatgccaatttttaagatagtgaggggaaaaagaaagaatgccagtatgtctttatgcatgttttattggtttttttgtgcattctaatccgttaataaaaggaaaggaaggaacactggtatgctatatcgtcagctcttattcacactgaatggaattagttttcaatggaattgttaaggtaaattgccaatttctacttttctagaaaatcacttttactgaaaaaccttgttcctaacccatcctataaaaatgggattttactgaactacctctaatgtcacattttgtacataatggctgcaaatgtctaaaatgttaaggaaacattataatttagaacaattctaggcaaaaagagatatttgtagaggatccggatgcataaaagaacaaatgagccatttaatttgtagtttagatgtcatttttctgacagttatcaatgaaactgtcatgtatccctggaatttggggctgttagaattatttattttgatatcattctttcacataattgtgtctgatattttaacagaaggtatttatgttcgcatgcatgtggacattatcaatactttcacgttacattattactcatacatgcattagttctgattctcttcaaaacctaatttgcataactacaatattatatatttataaatacttaattttgtacaatccttttcctacttgactaagaatatcaaagatgtccccaaatgcttacttgaaggttgatttagtcacactagcagaaccccaggctcaaatgtcaaatgggatcatttctgtacagtgcagtaaccatattgcagtctttctgctgctgaagttacagttgcatattactcatcaaggcaaaatgtaaatgtttagtgattatatgatatggtttttgttaattccccaaatgggattttttttacctttgtttatttgagaacaacaactgaatgctgaaatgcagtggctgatgccagcaatctaaggcttcattagtacagacgaagcaatgctcactttgctacataaataattagagagattaaatgaaaataaacactgagaggatgtgcagacgctccgaagttaggtaattattttaattactctagtgacttccagcaaccttcattatcagccacagatcaagcttaaattgttttatgtaagaatatcataagctatatggaaaagtaccatagcttacttagtgattatgcttcataaaaatgacattttctccaagctcccatttaaaggagttgtttccattccagcccctgatagactcgtgacatatttttaaagtataagtttttgcacttaaaaatgttttgccctggttttgtacttctaatggacatccttaatgataattttcgtatctttatatctttgctcagatttgatcataagagattcggggccacatattgagtggcttaatgtaaaayaatatggcatattcagccatctgaaataaatgtcacttggaatcatgtcatccttattgcatgacaagctataccttgcatttggggtaaatttatttcttctttcttccactccctagaccaacttgggaagactctaacatacactctaggaattatcttcattacaagcagaggtactatttagaagcattatcagtcctgtttagatttcattttatattcatttgataacgatgatccatcaagatctcttgtgttaaggtgttcttttgaggaagggttatctgtattgaaatatcatttattgactgcctgtgtaataatggctcttcttcaaactacccaacatacaccatttaatccttgcaagattcccatggagtatgtattattaaccccattttccagatgaggaaacaggccttgggaggttcactgattttctaaagttgcacagtagaaagtatcccagaggggactcaaacccaggtctgcctgactccaagaaccatgaagctccccaacagatgactgaatgaaataaacctgggtacaaatgctaagggtaatagaaaaaaatgaagtgacagtctgtgatgtgctaattaagtgttgtgttttatgacacccatgaattctgggcatgagctaaagtctcaaactgcaaattcaattgattttgaaagtgctttgggctaggcacaatggcttacatctgtaatcccagcactttgggaggccaaggcataaggactgcttgagcccaggagttcaagaccatcttgggtaataggagaccccagtctacaaaaactaaaatgaaaaaattagcagggtgtagcagcttatatctgtagttcctgctactcaaaaagctgaggcaggaggattgcttgagcccaggacatcgagactgaagtgagctgtgttcaagtcactgcaccccagccttggcattgaagagagaccctgtctgtctgtctttctctctctctctctctctcacacacacagacacacacacacacacacacacacacacacacacacagtgtttcatctctgaatagccctggttcctggagaggatgtaatagcaaataggttttatggcatagttggaccaaccaaaagttccccactaacaaaggttagtgatgtttttagtacaattcagtaacaacatgaattttattccagcaaacacaaggcattttaaccaaatttaaaatttccaacaggatgaaccagacttcagtaacttaggggagaggggtgcactgcttcctaagaaaaaccttttcttaaagggaggccttgacttctttcctcttccccatcctggcatgatgctggtgcagaatacatttccaaggttgtgttatattcagaggcacattaggctattcgagagaatgggaagaggtctaatggcttcgttgttttctatgtttaggatgcactaatctgcagagtttaatgtatgagttgtggatggcacagggaagttgggacagaaggctagctctagggagttgttggggtggctgggtgttagtctgaaatttcactctcacgtttcagaatctgaagaggaagttagggaaattcacagatgagccaatgccttttaacaggtggggggttcaggggtaggactgggagaagaggagctgtcagaaaagctggagagccattcgccccagagctctcagttgcaccagaacgcacagtcggagagagatttatttgtgaacaagcccgagaaaggcagacaacccagacaagatgggctcagaaattatttatcataggctagggcagaacagtctggagctttccttctgctttgcaagcacttccctgggacctgcctgggaagcacagcccttcttcctggtaagttacagaaggtcaggcactcagctagtaggccagctagacagcaaaaagtgtctaaactaagtgccaactgtttacttggggtcttccagaccctatcatggttctattcgtcatggtacactctgtttgatttcaatcgcaccatctttatatgtaggaaggccaaaccggcccggctgtgttgggtgggatttctgcaggccatgcagtgaggacgccactagctatagacacacgcaggagacccacgttctatttccatatgccacttgccactgacctcagagaaatcattttaaaccctgaacctcagcttccttatcctgaaaatgaaggccattctacttcttaggccttcttgacaggagccttgggagagccaaacggagtaattccggtgacagcgaagaactgggagggaccgtgactccaaattactgaagaaaaataagttaaacatgctcggctggagttttaggaattccacccgcccccacccgccatgatcaaactgcagtcaggcagcagccctccgaattgattctttcttatggactgtctcacatgccaaacacctatgtgcagcacccctccatctccgtgggctcctattgatgtctgccttgcagtgaaagcgctttttgttgccgctgttcgatacaccccagcacatcaacgcagcagctgggagcaggaggaggaatcccttcgctttctcccctcctttcactccgaaccctaggcatcagcagcaacgcgcgtagcccggcaaatttccgcacgtgaatggattttcctggctcatctccaaagaccttgcggtatttcacaaagctgaagagaggtgaacgagcatcaccccctccaggaggtcgtgcagccccgcggggacgctcctcccgctcctccacccgcggtgcagcggccgcctcccgagcttgctcgcggggccgttagcgccagacccggcggagagccaaggggtccctccgcgcctccctctcgcagcccctctccaccagtagcagcgctgctgtcttcccacaggaggacttgggaggacgctggattctgcagcgcccccgccccctcgctttttctttytttccttgctttgggatcttgctgctggatccggagaggttctgagaagacaagagcaagggactgagagcaggcttccgctgcggcgcgcgaacacagccgggacacaacccccagcgtctccacccgctcctcgccaccccggcgggaatgtgaggaaggaaagcccccagcgccgccgcccgccctcgaaggcgtcccagagagcgtcctgggggcccgcggctggagcccttgtgcccgcagcaccgccggactggagcggcgaggcgcaccgggtgccgcttctcggcttccactcttcagaaagagcgcggtggggatcagcgcctttcccgcactcggcacaactccgggaccggcggcgcgcggctggaccgagtcccgcttcccgccagctcacctggagtcgggggcagcccctgcccgcccgcctgcaccccttgtcgctctagcttgcgcgaacctgccgctcctccacgcccaggtagtgagccccgcggctccaggtctctgcagcgccctcggccccatggacagcgcacccatcaccactycctaagtgctggcgccgccgctgtccaagctgcgcactggggtccctcggctcgcccctctctggggtgtccgagaggccrgggagcgtgcaccatgaagtccgcgcttttcacccgcttctttatcctcctgccctggatcctaattgtcatcatcatgctcgacgtggacacgcgcaggccagtgcccccgctcaccccgcgcccctacttctctccctacgcggtgggccgcgggggygcccgactcccgctccgcaggggcggcccggctcacgggacccaaaagcgcaaccagtctcggccgcagccacagccggagccgcagctgcccaccatctatgccatcacgcccacctacagccgcccggtgcagaaagcggagctgacccgcctggccaacacgttccgccaggtggcgcagctgcactggatcctggtggaggacgcggcggcgcgcagcgagctggtgagccgcttcctggcgcgggccgggctgcccagcactcacctgcacgtgcccacgccgcggcgctacaagcggcccgggctgccgcgcgccactgagcagcgcaacgcgggcctcgcctggctgcgccagaggcaccagcaccagcgcgcgcagcccggcgtgctcttcttcgctgacgacgacaacacctatagtctggagctcttccaggaggtaaaggccagcctgccccgctgggtgggcgagggcgggagtgggcctccgggccggccgggctgcagtcacacgccccttgcactccgggtgcacttttgagttctcagttctccgtgcgcgcattcggggcaccgagtggagccgctccttgctggcactccgcagcctccgctggccgtgggggtggaggggctgtgtgtgagaggatcactgtggcttaaggggcgggagtctgccctggggcttttctgtgtggagattgtgtcaagagaatagcacaggtgtgaggcgcgggaatgatttccaggggccaggctcctgacgacctgaggatggagcttagacctgcaggcgctggctgcgataggagatcagggagggacctgcaccgtagcgggtggcggtggaggggtgggggtggtggggacgggtaggctaggtgttactcgaggcttttcagtgcctacaggtgtgattctcagtctaggaccatatagggagaaaggtggagatagcctagagagaaatttgactattgcggcccactggcacggaaatggttgttagaagaaacactgacttctatggaggtccttcctctctttcccacacctcacaaaagtcttttctgaccctcaagattactttttttttttttttgcaagaaaaccctttctggaaaataaactgttctgccctgtggttacgtcttttttgcagcccaaggtaaacatctgggctgcctgatcccttttcacaacctttctctaaggcctctttttggcgagttagccaggacacatttggcggggccttttgcgtctttctggtgcagccaggtcctgagtgcatccgggctccctgctgttgagatggcccatgagttccctgggatggccacgcgcgcaccgcccccccccgccgcccccggcaggcacagggttagaacaggtgttcttccttgaggctggtatcttgcggtgtgtgtgtgtgtagcctgcaaatgagactgagtggcatgggttttctcagttttcttctgtctacgcaattacagccaaagaaaatcttcttgattgatttgacgccctgtgagactgttgccttcctccacctgaaatttcttgacgtcctgcttcagagactccccctcaattccccttctcccaagtaaactggacattgggaaaatactatgtgtgagttggacactgaactgctaaaataatctgtgtgtctggtcatcagataccctaactgcttcccacactttcatcctcatctctgggttgctttcttaaccccagggcagagctattctgtactcttccagtttaatttttctgtgtggctttaaaaaaattttcttaaaggtaattgccgccttcatttctattcatcctctctttcatgaataaaaggcacagtaattgtccttcatcttttcttttccatcctttcactgtagagggctttctttccacgtttctccaaatgaataaataagcttggcattgtatagtatggtccttactcaacccaagattagagataccatctgacgtttttaactgggcttttaatcctgcwtcagtgctcccccctccaaaagaaaaaagtggcttgcatctgaagcaaagactgtacatttcaatgcaccacaatttttaaaccgcaaggtctttttattttcttctacaacttcgaagttgcctcgtctgtgacaatatgtggtcttgttgaagtaaaatagtgcacattactgttaatgaacactgtaggaggctagattgtgaaggaggaatgatttagtttattccgagcttctagcctcttggtgtgaggtgttagaagaattggcacacgcaggcagtgaaatgattcaggacacagccttcctttgatgcttcccaaactgaaaggagggtttgttggtgggggatattaagcatcaggagaaaattccagtaggtttttcattagtccatatgggggaaaatataaaatgaggagagggtaaggagaaaaaaatagtgttgtcagagaggacattataaaggaaaaacgcaaaactttcaagacactaaacttttgtacaattggaagtaatgcaataaaataaaataagagcatatgcaacattttttaatggtgaggtgccacatatacaaaaaatacaacaggtttattgtttctgttgtcattttaagcataataggcatgacatacttagaatttaagttttctatctcctggaggtcactcccagacagtaattttatgactagtacctttctctaccactcccccaccagcattgtttttggacagattaggcctttgtttgacatatatgtatgctgatacattcagttttctttattataacattttccatgcatggcaaacattattgaattccatcattaggctagtggaatttatgaattcttagtcttgtgcattttccagaatttggaaatccgtaggtttatttgtgagacagcctaccatacacccgttctcagattaatgattccgtgtaaattatagtttagacattgttctctggagaaaacgtaggaccagataaaacattgaaaatctacagctccttgggggaaagcaaagatgctgattaggaatgctatagggctgaggcatatatctcagccctttatattgtgcatgcacaccaattagtttttcagtaattcacagtacttaaggaaagaataccccaagtcaggtttcatcttttattcatggtgcttctaatttccatggttgatgttaaagtggataagataaaaggaggaaaatgaaccasgtacaaattagctccgtaagtattggctgcaaatgaaggaaagcaaaggatgaaaggtctccaaattaaattaaagacgcaacaggcaatctgtgttcaattattcctccctggtaactggaatggtgctttgtcatctcatacagctaactaattttcagcctttcctttcaactgatctgcattgccaggaaagaaatatttgcattgaatactcttatgttaacagccaaatccatttgcaaatgaagtttagtgtgaatcttagctacagaaatgggcctgttcattggagaaggaggtggtggggtttttcaggtttcaaaaatctcaacagctactcctcttcttcctgtggcattgatggggttttgcactgtggatcacaggtaatcctgcctccctgtgcatcctatccatctmcctctctggaaaagcttacttgcaaaggatttaagctgctttaataaaagccacaactacagataaatgtgactttatttttagtcatgttttcaataacactattgatcagatttctgtttttcaccagaaaaccttcaaagctttcttaaatttaaaacagatgcttttcaggtgaagttggtttcacctctggaaatcaattgaattgaaatactaaaaaaaaatagcactttccaagcaagaaaaaaaaaaactttagaaattttgaagttaatgaaataagactggaagacaggctggctctcagacacttaaggggttatcaaaggagtcagtgactgagattgcatctagaagatgtttctggaaagcaatgaactaaagaagccccttgcttgaatcttttgttgggtgctattcagctatttgtgtactaggcagataaaggagttttgaggattaattctgtcttgcttttttttcagaagtatttgtgtgctttccctctttacctgctgcttattggagtcataatctgaaggatatacgagtttacaatgtttggccctttcccccctaaatagtacttctatttatgtttcctgaaaggaaacatgagatttaccttttacccttggtacatttactttatttagggtaattctttttaaagtgaaggaacctagaagattttcttgggtggaacattaaaagaccattttacctgaaatgtgccccttgtattttatttctttccctctgaaagctattaagagtcatgccataggtctgataaaatgtgagaattttatagaaatgtatatatgaaactacagccaattttcttaggctataaatgttaggttttctttattctccctgggtgtacagtatttgaattatggttcgtttttgataagagttttctttggagaccagtagttttcatttggatgttgatattttaatggaccagaaataacaatttgggcctaaagatgttctcccttctgcctcttcctattgtctttttccatcattcttcctctctcaacctacttttcactgatgattctgtctcgtgaatagacatgaaaacatgttcggattattgcttggtgcaatgaatgttgtatcttttaaacatttaggctgttgctgcttcttggaaaccattgtgggtggctcccttttttctgtctactctgcttgcctctaaattacaagctggtaaattttctcttgtgtgaacagtaatggaatagtaattgcytttaaggcatgctgcaaaagcaaaatagaaaatccaaagtcaatggtcttatttattaactatttcaggtggtattcaagtagtggtaggttttttgttgtcgtcattgttttttgcacagaattcaatattgtacagatatgtctatttaaatgttttggactctggaatattcagcctgtgtaagttaacacatatatatttgattcacagtgcttgtgaagcatgaaatttaagttttgcatggagctcaaattctcccaccaaaatacaaataaaattgttataccagtacatagatagatgcataggtaggtttagaatacatctccaaagcacagaaataaaactaagataatttgttgttcatgcctggtaatttttgcatacaattttaaataaatgttaataccctatatcatggatacaagcaaaatatagttgacataaattgagcatttactataggcaaagaagtacccttagggttttacgtgtattatttaatcttcataacaccctgaggtaggtaatagtactgtctctgtttgtttgctgttttaatactaatgctaatatttagttatggacgcagtcccttggtgagtacagaggacttaaacaaatgcaacctgacggtaatatagttgtttacctctgatctatataatcagtatccccrtttttaacagaagcactaggaagtaacttgaaaatgtcatgtagctgttatgtggcagagatagaattttgaacccaggtgccctggttctagcgcctgcattgttgactgtcctgaaactcatgtcatttaacacatgaaaatatgtcatcattataataagtaaagcacctgattagcaggagccttgtgatattattactgtcttctgccattyttgaattcaggtctttcttcttggttatgtcaactcttagctttctcctttgaccttttgttacttttttcctttttgttgttaatgtattacattgaaaaataaaattttttttttttgcaagaaaatgtactttattagctttctttgttctgtgggttgatcttcctggatatttctttattttattttattttattattattatactttaagttttagggtacatgtgcacaatgtgcaggttagttacatatgtatacatgtgccatgctggtgtgctgcacccattaactcgtcttttagcattaggtatatctcctaatgctctccctccccccaacccccaccccacaacagtccccagagtgtgatgttccccttcctgtgtccatgtgttctcattgttcaattcccatctatgagtgagaacatgtggtgtttggttttttgtccttgtgatagtttactgagaatgatgatttccaatttcatccatgtccctgcaaaggacatgaactcatcattttttatggctgcatagtattccatggtgtatatatgccacattttcttaatccagtctatcattgttggacatttgggttggttccaagtctttgctattgtgaatagtgccgcaataaacatacatgtgcatgtgtctttatagcagcatgatttatagtcctttgggtatatacccagtaatgggatggctggatcaaatgatatttctagttctagatccctgaggaatcrccacactgacttccacaatgrttgaactagtttacagtcccaccaacagtgtaaaagtgttcctrtttctccacatcctctccagcacctgttgtttcctgactttttaatgattgccattctaactggtgtgagatggtatctcattgtggttttgatttgcatttctctgatggccagtgatgmtgagcattttttcatgtgtcttttggctgcataaatgtttcttttgagaagtgtctgttcatgtccttcacccacttgttgatggggttgtttgttttttcttgtaaatttgtttgagttcattgtagattctggatattagccctttgtcagatgagtaggttgcgaaaatattctcccattttgtaggttgcctgttcactctgatggtagtttcttttgctgtgcagaagctctttagtttaattagatcccatttgtcaattttggcttttgttgccaatgcttttggtgttttagacatgaagtccttgcccatgcctatgtcctgaatggtaatgcctaggttttcttctagggtttttatggttttaggtctaacgtttaagtttccatcttgaattaatttttgtataaggtgtaaggaagggatccagtttcagctttctacatatggctagccagttttcccaacaccatttattaaatagggaatcctttccccattgcttgtttttctcaggtttgtcaaagatcagatagttgtagatatgcagcgttatttctgagggctctgttctgttccattgatctatatctctgttttggtaactgtagccttgtagtatagtttgaagtcaggtagtgtgatgcctccagctttgttcttttggcttaggattgacttgacgatgtgggttcttttttggttccatatgaactttaaagtagttttttccaattctgtgaagaaagtcattggtagcttgatggggatggcattgaatctataaattaccttgggcagtatggccattttcasgatattgattcttcctacccatgagcatggaatgttcttccatttgtttgtatcctcttttatttcattgagcagtggtttgtagttctccttgaagaggtccttcacgtcccttgtaagttggattcctaagtattttattatctttgaagcaattgtgcatgggagttcactcatgatttggctctctgtttgtctgttattggtgtataagaatgcttgtgatttttgtacattgattttgtatcctgagactttgctgaagttgcttatcagcttaaggagatttttggctgagacaatggggttttctagatatacaaccatgtcatctgcaaacagggacaatttgacttcctcttttcctaattgaataccctttatctccttctcctgcctaattaccctggccagaacttccaacactatgttgaataggrgtggtgagagagggcatccctgtcttgtgcccgttttcaaagggaatgcctccagtttttgcccattcagtatgatattggctgtgggyttgtcatagatagctcttattattttgagatacgtcccatcaatacctaatttattgagaatttttagcatgaagggttgttgaattttgtcaaaggccttttctgcatctattaagataatcatgtggyttttgtctttggttctgtttatatgctggattacatttattgatttgcgtatattgaaccagccttgcatcccagggatgaagyccacttgatcatggtgagtaaggttttgatgtgctgctggattcggtttgctagtattttattgaggatttttgcatcaatgttcatcaaggatattggtctaaaattctcttttttggctgtgtctctgcccggctttggtatcaggatgatgctggcctcataaaatgagttagggaggattccctctttttctattgattggaatagtttcagaaggaatggtaccagttcctccttgtacctctggtagaattcggctgtgaatccatctggtcctggactctttttggttggtaagctattgattattcccacaatttcagagcctgttattggtctattcagagattcaacttcttcctggtttagtcttcggagggtgtatgtgtcgaggaatttatccatttcttctagattttctagtttatttgcgtagaggtgtttgtagtattctctgatggtagtttctatttctgtgggatcggtggtgatatcccctttatcattttttttgtgtctatttgatttttctctcttttcttctttattagtcttgctagtggtctatcaattttgttgatcctttcaaataaccagctcctggattcattaattttttgaagggttttttgtgtctctatttccttcagttctgctctgattttagttatttcttgccttctgctagcttttgaatgtgtttgctcttgcttttctagttcttttaattgtgatgttagggtgtcaattttgaatctttcctgctttctcttgtgggcatttagtgctataaatttccctctacacactgctttgaatgtgtcccagagattctggtatgttgtgtctttgttctcgttggtttcaaagaacatctttttttctgccttcatttcgttatgtacccagtagtcattcaggagcaggttgttcagtttccatgcagttgtgcagttttgagtaagtttcttaatcctgagttctagtttgattgcactgtggtctgagagacagtttgttataatttctgttcttttgcatttgctgaggagagctttacttccaactatgtggtcaattttggaataggtgtggtgtggtgctgaaaaaaatgtatattctgttgatttggggtggagagttctttagatgtgtattaggtccgcttggtgcagagctgagttcaattcctgtgtatccttgttaactttctgtctcgttgatctgtctaatgttgacagtggggtgttaaagtctcccattattattgtttgggagtccaagtctctttgtaggtcactcaggacttgctttatgaatctgggtgctcctgtattgggtgcatttatatttaggatagttagctcttcttgttgaattgatccctttaccgttatgtaacggccttctttgtctcttttgatctttgttggtttaaagtctgttttatcagagactaggattgcaacccctgcctttttttgttttccatttgcttggtagatcttcttccatccttttattttgagcctatgtgtgtctctgcacgtgagatgggtttcctgaatacagcacactgatgggtcttgactctttatccccagtcaagacccatcagtctgtgtcttttaattggagcatttagtccatttacatttaaagttaatattgttatgtgtgaatttgatcctgtcattatgatgttagctggttattttgctcgttagttgatgcagtttcttcctagcctcgatggtctttacgttttggcatgattttgcagtggctggtaccggttgtgcctttccatgtttagtgcttccttcaggagctcttttagggcaggcctggtggtggcaaaatctctcagcatttgcttgtctgtaaagtattttatttctccttcacttatgaagcttagttwggctggatatgagattctgggttgaaaattcttttctttaagattgttgaatattggcccccactctcttctggcttgtagagtttctgccgagagatcggctgttagtctgatgggcttccctttgtgggtaacccgacctttctctctggctgcccttaccattttttccttcatttcaactttggtgaatctgacaattatgtgtcttggagttgctcttctcgaggagtatctttgtggcattctctgtatttactgaatctgaatgttggcctgccatactagattggggaaattctcctggataatatcgtgccgagtgttttccaactcggttccatcctccccgtcactttcaggtacacaatcagacgtagattttgtcttttcacatagtcccatatttcttggaggctttgttcatttctttttattcttttttctctaaacttcccttcttgtttcatttcattcatttcatcttccatcactgataccctttcttccagttgatcgcatcagctcctgaggcttctgcattcttcatgtagttcttgagccttggctttcagctccatcagctcctttaagcacttctctgtattggttattctagttatacattcgtctaaatttttttcaaagtttttaacttctttgcctttggcttgaatttcctcctgtagctcggagtagtttgaacgtctgaagccttcttctctcaactcgtcaaagtcattctcygtccagctttgttccgttgctggtgaggaactgtgttcctttgggggaggagaggtgctctgctttttagagtttccagtttttctgctctgttttttccccatctttgtggttttatctacttttggtctttgatgatggtgatgtacagatgggtttttggtgtagatgtcctttctgtttgttagttttccttctaacagacaggaccctcagctgcaggtctgttggagtttgctagagatccactccagaccctgtttgcctggttatcagcagcggtggctgcagaacagcgtattttcgtgaaccgcgaatgctgctttctgatcgttcctctggaagttttgtctcagaggagtacctggccgtgtgaggtgtcagtctgcccctactggggggtgcctcccagttaggctgctcgggggtcaggggtcagggacccacttgaggaggcagtctgcctgttctcagatctccagctgcgtgctgggagaaccactgctcttttcaaagctgtcagacagggacatttaagtctgcagaggttactgccatctttttgtttgtctgtgccctgtcctcagaggtggagcctacagaggcaggcaggcctccttgagctgtggtggcctccacccagttggagcttcccagctgctttgtttacctaagcaagcctgggcaattgcgggcacccctcccccagcctcgctgccgccttgcagtcgccttgcagtttgatctcagacctgtgctagcaatcagcgagactccgtgggcgccatgtgtgggatataatctcctggtgcgccgttttttaagcctgtcagaaaagtgcagtattagggtgggagtgaccygattttccaggtgccctctgtcacccctttctttgactaggaaagggaactccctgaccccttgcgcttcccgagtgaggcaatgcctcgccctgctttcgcttgggcacggtgtgctgcacccactgtcctgcgcccactgtctggcactccctagtgagaygaacccggtacctcagatggaaatgcagaaatcacccatcttctgcgtcgctcacgctgggagctgtagaccggagctgttcctatttggccatcgtggctgccagctcaaaattatatgttaatatatttgttgtgtagactataatgttttgatatagggatacattgtggaattactaaagctaattaatatattcattaccttacaattttatcattttttgtgtgtgtggtgaaaacatttaaaatctcctcagcagtttgcaggtgtacaatacattgttaataactatagtcaccaatttgtgttgcagttgatcttctaaatgtattctttctaactgaaattttgtatcctttgaccaaacatttccccaattcctacccctaccttttttctcctgataatatttggtcttgtgaaaattttatctcatctctcactatctctgatttatagaccatttgatatttatttttacaagctagataaaaactgccaagttagtatataaactgtagtcttttattttttaaactacgtattcttgtgaataagaattgataacttctatagatattaaaattaagtttttcctcatttgctatgtatacatcaacaactctgtctcctaggcgtgtatcatgtcagggcaggcagaactgaacggaagaataattttcagggtagaatgggagaaaatacagaattatgtgaagcaggctcaggggtttattattgaaacagaggagaggagctgggggcctgagccaatttgcgctgaagccaatgtggctgagatggctccttctgggaacagagatgtgcttggaggagccttggttctcctcaccaatataccccttatgttggctgctgcaggcagcactaccaggttcatttgactgctcacttgttggtagaaggtttgttaattttcttgtccgatttcttctgagattaggaatttccttggattaaaaacaaaataaatcattggttgagtctttttgcaggttaaaaaaaacaagaaaacttggaggtggatttgctgaggaggacagccatgttctctaccagaagtcagattgggtctttttcctaaaacaactaaaaacgcagtagtttgtttactttttaaaatccgtctcctccacctgtggaaagagaactttaaacactatttatgttacatgctgaatctaagactgttgttccttcagcttgaactgcagatattcctaaattgtacctgcatctctagtgaaagctgagtgtgctaaatgctgaccattctccattaactgagatttcagttatctaagagatttgcatcttagcagtactactgtattactctgtaagattccttctacctacctgagctcaaacttcatcctattcagaagatgttttaatataacaagtcagtaggccttctctaccacttaacaaatattaattgagcacctactgtgtacaaggcactgtgcttaattaagtcagggagtatttcagctccctgaaacagagagcatctcagccctcccagattgattctctggactaaatatgcatggtagcttcagtgcctgttgagagaaatgaatgtgtctgggagtgtaaagcagaggtccctaatggagttgttgattgtaggagtaattgtggaggaagtgacatttgagctgagaagtaaagaacaacagggcctagtgggtgatgggacagggatgaaggagccctccagagagagaaaaccatatttgtggacctgaatactcagagacctgaaggatgttcttgatggcaagaggctgggtggtgagaagatgaggtggagaaataggcagccacttttccatcttctgcatgtcaaagtgctgttctcatctttgagagaagctgtcctgtaaagaactcttcaggttctgtgtatttggaagtggcatctaaatcatgcccattggaatcttcttcctggatactatcatgtctttatgtaaacttgtgaatttaaaagtatacatagcagtgtcggagcaggctttcctttttatttttttgcatctggttttcagaatgcccattaggcaaatttttgacctttaactttttcaataggccttggataaggtgggtggtaaattgataggaaaactatagataagtatttgtccatctagttgtaccaaagaagtggtaatatagacttttgtggatcctttagagcacctgatatcacattaaataatatgatacctgaatatgtatttcagttgtttctcccactagaataccagggtaggaattttcttttgtttactgttgtatctgtagtgtccagagcagtgcctagcatgcagtgaatgcttattaaatattttttgaatgaatgaattataagacacttggaagctgagggaatttattataaacagagtttaatccctgaaaggagtcctgcacagagattgtcaatcaaatcatagttttgaagtctgtgttstatgtctaagattgtattgagccctttaaatagaaactggaagataaacgtggtccctactctgattctaagagcttttatactaaaaggaaagagaatgtcatgagcatttatgtatatagcaaggcattaccatcaacagccattaaaaggggaggtttgtcaaggtggtcgtgagtcagttgagtatttggcctcttcacacgtgtgagaggctggaggctggtggggagctcacataggcgtaacagcccatgttcaaatccagcttcactgcttagtgtttgcattacattggcaagggttgactgcctcgagtgattgttttaagtgctctaggcaagtwataaatattagttctttttgccttgttctttccactatgggtgactgccctaattgagggtataccagataattgcactgtcttgatttgttaagtgcctctaaatgttcttctcctgacatctggactatgtttctagaggcctagggggaggaggaggtaaaggcacttgactttcccaaattagtctgtacccaagtggaactgcataaattgggtaccttaattacaccattgggtattactagggtgattacagggacaagagttaaatagggcttgtctacaaagagtcctgggaggaagtgagatgtgagagaactaaaagcatctaaaggacattttagatggagaggaggtgaagggtgttctcctgtgggttctgacttctgatgctaactcctaacggtgaaagctaggaagttgacttacatgtagctcagaggaggatgctaacctggctcactgcaacttccacctcctggattgaagcgattcccctgcttcagcctcctgagtagctaggattacaggtgcaagccatcatgcctggctaatttttgtatttttagtaaaggtggggtttcaacatgttggccaggttggtctcaaactcctgacctcaggtgatgcaccyacctcggtttcccaaagtgctgggattacaggtgtgagccacggtgcctggccctaggtgtggtttttaattactatgtaatcccagggcccagtgtggacctaggacatagttactacatgatacagtgattatcgttggcacaaatgaatgaatcaaagagatagtatgttacaaaggagagggcacgaaatagattttttttttgagcacatgattagaagcagtattttaaggtcatttcctgggctgggaaggttaggaatattcttctgaccagcacctgttggaggaggtggaaaggatcccagatgccagccttctctgtgtccacccttctcccagccttgcctggggacactgagccccttgctgggcttcaagtgcctgatgcttttttgggaagccccataagcttgcttctctttttgcaaacattgcttaagttttcattaataaaaacattctaaagcttatttagtccagaatgaggaaaatgtaggagagagagagggtgtgggtgtgtgtgtggggcgagggggtgtctgtgtgtggttttacctacctatgtggttgccccttcttacctgtgaatgcagtggctgctttccttgttccttctccacagaccctgtaccctccatttcagtttctggcaagaattgtggccagacccagggatctgatgcagtggtccccaacattttctggtcacataatttctaaaagaattttgtaacattaaccctctgggatattttttaattgacatctacattttattttttttattattttattattattatactttaagttttagggtacatgtgcacaatgtgcaggttagttacatatgtatacatgtgccatgctggtgtgctgcacccattaactagtcttttagcattaggtatatctcctaatgctatccctccccccaacccccaccccacaacagtccccagagtgtgatgttccccttcctgtgtctgtgttctcattgttcaattcccatctatgagtgagaacatgcggtgttggttttttgtccttgcaatagtttactgagaatgatgatttccaatttcatccatgtccctgcaaaggacatgaactcatcattttttatggctgcatagtattccatggtgtatatatgccacattttcttaatccagtctatcattgttggacatttgggttggttccaagtctttgctattgtgaatagtgctgcaataaacatacatgtgcatgtgtctttatagcagcatgatttatagtcctttgggtatatacccagtaatgggatggctggatcaaatggtatttctagttctagatccctgaggaatcgccgcactgacttccacaatggttgaactagtttacagtcccaccaacagtgtaaaagtgttcctatttctccacatcctctccagcacctgttgtttcctgactttttaatgattgccattctaactggtgtgagatggtatctcattgtggttttgatttgcatttctctgatggccagtgatgagcgttttttcatatgtcttttggctgcataaatgtcttcttttgagaagtgtctattcatgtccttcgcccacttgttgatggggttggttggttttttcttgtaaatttgtttgagttcattgtagattctggatattagccctttgtcagatgagtaggttgcgaatattttctcccattttgtaggttgcctgttcactctgatggtagtttcttttgctgtgcagaagctctttagtttaattagatcccatttgtcaattttggcttttgttgccaatgcttttggtgttttagacatgaagtccttgcccatgcctatgtcctgaatggtaatgcctaggttttcttctagggtttttatggttttaggtctaacgtttaagtttccatcttgaattaatttttgtataaggtgtaaggaagggatccagtttcagctttctacatatggctagccagttttcccagcactatttattaaatagggaatcctttccccattgcttgtttttctcaggtttgtcaaagatcagatagttgtagatatgcagcgttatttctgagggctctgttctgttccattgatctatatctctgttttggtaccagtaccatgctgttttggttactgtagccttgtagtatagtttgaagtcaggtagtgtgatgcctccagctttgttcttttggcttaggattgacttgacgatgtgggctcttttatggttccatataaactttaaagtagttttttccaattctgtgaagaaagtcattggtagcttgatggggatggcattgaatctataaattaccttgggcagtatggccattttcacaatattgattcttcctacccatgagcatggaatgttcttccatttgtttgtatcctcttttatttcattgagcagtggtttgtagttctccttgaagaggtccttcacgtcccttgtaagttggattcctaagtattttattatctttgaagcaattgtgcatgggagttcactcatgatttggctctctgtttgtctgttattggtgtataagaatgcttgtgatttttgtacattgattttgtatcctgagactttgctgaagttgcttatcagcttaaggagatttttggctgagacaatggggttttgtagatatacaatcatgtcgtctgcaaacagggacaatttgactccctcttttcctaattgaataccctttatgtccttcttctgcctaattgccctggccagaacttccaacactatgttgaataggagtggtgagagagggcatccctgtcttgtgcccgttttcaaagggaatgcctccagtttttgcccattcagtatgatattggctgtgggcttgtcatagatagctcttattattttgagatacgtcccatcaatacctaatttattgagagtttttagcatgaagcgttgttgaattttgtcaaaggccttttctgcatctattgagataatcatgtggtttttgtctttggttctgtttatatgctggattacatttattgatttgcatatattgaaccagccttgcatcccagggatgaagcccacttgatcatggtgaataagctttttgatgtgctgctggattcggtttgccagtattttattgaggatttttgcatccatgttcatcaaggatattggtctaaaattctcttttttggctgtgtctctgcccggctttggtatcaggatgatgctggcctcataaaatgagttagggaggattccctctttttctattgattggaatagtttcagaaggaatggtaccagttcctccttgtacctctggtagaattcggctgtgaatccatctggtcctggactctttttggttggtaagctattgattattgccacaatttcagagcctgttattggtctattcagagattcaacttcttcctggtttagtcttgggagggtgtatgtgccgaggaatttatccatttcttctagattttccagtttatttgcgtagaggtgtttatagtattctctgatggtagtttctatttctgtgggatcggtggtgatatcccctttatcatttttttgtgtctatttgatttttctctcttttcttctttattagtcttgctagtggtctatcaattttgttgatcctttcaaataaccagctcctggattcattaattttttgaagggttttttgtgtctctatttccttcagttctgctctgattttagttatttcttgccttctgctagcttttgaatgtgtttgctcttgcttctttagttcttttaattgtgatgttagggtgtcaattttggatctttcctgctttctcttgtgggcatttagtgctataaatttccctctacacactgctttgaatgtatcccagagattctggtatgttgtgtctttgttctcgttggtttcaaagaacatctttatttctgccttcatttcgttatgtacccagtagtcattcaggagcaggttgttcagtttccatgtagctgagcggttttgagtgagtttcttaatcttgagttctagtttgattgcactgtggtctgagagacagtttgttataatttctgttcttttacatttgctgaggagagctttacttccaactatgtggtcaattttggaataggtgtggtgtggtgctgaaaaaaatgtattttctgttgatttggggtggagagttctttagatgtgtattaggtccgcttggtgcagagctgagttcaattcctgtgtatccttgttaactttctgtctcgttgatctgtctaatgttcacagtggggtgttaaagtctcccattattattgtttgggagtctaagtctctttgtaggtcactcaggacttgctttatgaatctgggtgctcctgtattgggtgcatttatatttaggatagttagctcttcttgttgaattgatccctttaccgttatgtaacggccttctttgtctcttttgatctttgttggtttaaagtctgttttatcagagactaggattgcaacccctgcctttttttgttttccatttgcttggtagatcttcctccatccttttattttgagcctatgtgtgtctctgcacgtgagatgggtttcctgaatacagcacactgatgggtcttgactctttatccaatttgccagtctgtgtcttttaattggagcatytagtccatttacatttaaagttaatattgttatgtgtgaatttgatcctgtcattatgatgttagctggttattttgctcgttagttgatgcagtttcttcctagccttgatggtctttacgttttggcatgattttgcagtggctggtaccggttgtgcctttccatgtttagtgcttccttcaggagctcttgtaaggcaggcctggtggtgacaaattctctcagcatttgcttgtctgtagagtattttatttctccttcacttacattttaaaaatcattttaaactgttgcaaaacttttgatttccagtgcattataaatgttgacatttgtaatgaaatttaaatatatccagtagatctataaatattgttaacagtttgatacccaccaccattcatttaataaacatacttttcaatgacatttggatggagatatatatatacacatatatatatttttaagtgagacagggtctctctctgttgcccagactggagtgtagtggtgcgatcacagcttactgcagcctccacctccctgggtcaagcaattctcctgcctcaccctcctgagtagctgggactacaggcacatgccaccatacctggctaatttttatttttatttttttttggtagagacagggtcctcctatgtttccctggctggtctcaagctcctggcttcaagcagtcctaccgcctcatctttccaaagtactggtattactggtgtgagccaccacacctggccacgtttggatattttatattgctcttttttttttctatcttcattcctcctcagaattttatcttagcataatattttgaggttcaaagtcatctccctattacacatatctacaatgacaaaaagaatatagatagaatttaaagttttataatcctgtggctatcagcctctgtcttagaaaagcttcaggactgacttaccattacaattagtattggtaaacaattaatcaaaacaacaataaatgttacagggttgggtaattaactattaaacataaaagctacatttattagatttcttagtgacatggatggagcattttgttgttgattatatattctgtattgacaaatattacagattgctagagatagaatttagtataaatttcattcctattaggtcaacttttttttacgtaaagaagtaattaaggtgggaatcattttcttacagcagtgtttctcagttttttgaactctcaagctttaagccaaaaattacatggtgatctgacagcaaaaactattttaatgatttattaatgatattaggtcacctccagttttgttgaatgcaaatagttagaaacctctggttgccccaaaggatttattacccattcattagagacattggctttcttaataaagatagcaatatttctgattacctttgtttggtgccctggaggttatattaggtgggacagtgcatttaataacaatacaggatgggtgagcagtcaggccctttgtgaagtgggagaagggtgatgtgaagtggggtggggcgggggtggggggcagagcgagagagaagcatggagaacctgcccctatccaagtggatcagttttaggaaagcttatgccgtatgtagggatgccaagggtctgggaatttattccctaacttaaagttatctgcattcacatattccatggagagttgtatgcattcaggtatcatgcactcccagtctgaaaaactgctcttttggttgaaagagtataaggacttggaagatggggcctctaggcctgactgagccaaaggctcccatgacctcaagggaactgactagtgcttttttcattttttactgcgttctgggtcccacccttggcattcagatgtgtgcatgagctgctgtttaattttcatcatctgctttacaaatgaggaaaagccctgatatccagctccctcataggacctgataataatacatatggttctgagaattaaacgaggtaataggtacgtaaagtgggtaaacagagtaacttcactctctatttgtacgtctctcagaagtctggggcaacaggagctgtggaaggctccagaagacaagatgtcacaaagccacctagctactgtggctgtaccaatcctgacagtcatagcggccccaaggtgctgctctgttggctgatgggaatgcagatttacgtatggtccatatrtggacgtgttgttttacatctaaataaacttggcattgcaagatgaaaatgccagtatcatttttaaaggtcaagtgacagtttgggaagatttttataactttgataagttcctcagctacatctgttcacactggcaagagtgctagagacattcttgggaagtcttttctatcagaggagctgcagccttgctctgcagaaaagttctgatgacagtcatcagagtatttggggctcatgcactaactgttaattattttcatttttcattaatgaaaatttattttaatttttttcattcttctttaatgaatttaactatttgcctctacctttgcttcctgctttgtatactgataagacaggttttggggtttttatgttttctggtcttgcttttcccctttgttttaggatttaaaaaacaaaaaggttaagagggtaggttgacagtgcttgcagtttctgttttacagcaatcccagctgttcctctgaaaattggttgattgtcctatagtttaaaatatatagatgttcatttgattggctcttgtaaatctagtgacatttaaaagtacatggcagctagtcatggtggctcacacttataatcccagcactttgggaggctcaggcaggaggatggcttagcccaggagttcgagaccagcttgggtaacatcatgagaccccaactctacaaaaatttttaaatagttgtgagtggtggcatgtgcctgtaccctcagctacttgagaggctgaggtgggaggattgtttgagacctggagtttgaggttgtggtgctctatgattgcaccactacactccagcctggatgatagactgagaccctgtctcaaaaaagaaaaagaaaaaagttcatgtctattctgttttttgttatgttactttcctctaaacatgaagaaaagcagtgaggagaaacaaaaattgagtattcctgtgttttttatcatagtaaaatatacatttgccattttatatttatcctgataaccttcagtgttgtaaaatacacattcacaattattcatttaacctgataacctctaatctcttttccatgaatcggactaggtacctcatataagtggaatcataccatatttatacttttgtgtctggtttatttcacttaatgtccttaaggttcatccacattgtagcatgtctcagaatttaattcctttttggggctgaataacattctattatatgtatattccacattttgcttatccattcatctcttgataggaagttgtgttgctttcacattttacctattgtgaataatactggtaccaatattagtgtacacataatctgagtccctgctttccgttcttttgggtatatacacagaagtaaaattgctagacacaatggtacttctatgtcagttttttgaagaactaccctactgttttccatagcagttacaccattttacatttctatcaccagaccacgagggtaacaatttctccacaccttagccaccacttgttattttttgttttttgggtaatagccatgcaaaaaaatatgaagtaaagtgaaatatcattatgaaaggtgtgaagtgatatgtctttgtgattttgatttgcatctctcctataattagtgatgttgaacatcttttcatgtgcttattggccatttgtctgtcttctttggggaaatatctcttcaagcctattctgcccatttttgaattgggttttgttgtttttaggaattctttagatattttggatattagtcacttatcagatatgtgatttgcaaatgaggatggcctttttattttgttgattgtgttctttgcacaatagtttttatttttgatgaaatataattttctattttgtgcttttggtgttatatatctaagaaatcatgccaaattcaatgtcatgaaggctttctcctgttttcttctaatagtgtgtagttttagctcttttgtacgtggtgttgggtaagggttcaacttcatccttttgcatgggaatatccagtttttttcccagctgcatttgtcaaaaagactcttctttcttccgttgaatgatctcagtggaagtcactgatctcatcaaaaatcactgaccatatgtgggagcataaccacctgatgggttcttcttgcctgctgcccaaatatagctggtttatcaagatgggaattgcaatagagaaagagctttacacatgtacagctggctaaatgggagactggagctttattattaaataaataagcctcccccaaaatttggatgctagggttttctctttttttttctttttttattattatactttaagttctagggtacatgtgcacaacgtgcaggtttgttacatatgtatatatgtgccacgttggtgtgctgcacccattaactcatcatttacattaggtattctcctaatgctatcccttccccctccccccaacccactacaggccccagtgtgtgatgttccccaccatgtgtccaagtgttctcattgttcagttcccacctatgagtgagaacatgtggtgtttggttttctgtgcttgagatagtttgctcagaatgatggtttccagcttcatccatgtccctacaaaggacatgaactcactcttttttatggctgcatagtattccatggtgcatatgtgccacattttcttaatccaatctgtcattgatggacatttgggttggttccaagtctttgctattgtgaatagtgccgcaataaacatacgtgtgcatgtgtctttataatagcatgatttataatcctttgggtatataaccagtaatgggatggctgggtcaaatggtatttctagttctagatccttgaggaatcaccacactgtcttccacatggttgaacgagtttacactcccaccaacagtgtaaaagtgttcctatttctcccatcctctccagcacctgttgtttcctgactttttaatgatcgccattctaactggtgtgagatggtatctcattgtggttttgatttgtatttctctgatggccggtgatgatgagcattttttcrtgtgtctgttggctgcatgtcttttgagaagtgtctgttcatatccttcgcccactttttgatggggttgtttgattttttcttgtaaatttgtttaagttctttgtagattctggatattagccctttgtcagatgggtagattgcaaaaatattctcccattctgtgggttgcctattcactctgatggtagtttcttttgctgtgcagaagctctttagtttaattagatgccatttgtcaattttgacttttgttgccattgcttttggtgttttagtcatgaagtccttgcctatgcctatgacctgaatggtatagcctacgttttcttctagggttcttatggttttaggtcttacatttaagtctttaatccatcttgaattaatttttgtataaggtgtaaggaagggatccagtttcatctttctacatatggttagccagttttcccagcaccatttattaagtagggaatcttttccccatttcttgtttttgtcaggtttgtcaaagatcagatggttgtagatgtgtggtattatttctgagggctctgttctgtgccattggtctatatctctgttttagtatcagtaccatgctatttggttactgtagccttataatataatttgaagtcaggtagcaagatgcctccagctttgatctttttgcttaggattgtcttggcaatgtgggctcttttttggttccatatgaactttaaagtagttttttccaattatgtgaagaaagtcattggtagctcaatggggatggcagttaatctataaattaccttgggcagtatggccattttcacaatactgattcttcctatccataagcatggaatgttcttccatttgtttgtcctcttttatttcattgagcagtggtttgtagttctccttgaagaggtccttcacatcccttgtaagttggattcctgggtgttttattctctttgaagcaattgtgaatgggagttcactcatgatttgtctctctgtctgtttttggtgtataggaaagcttgtgattttgcacattgattttgtatcctgagactttgctgaagttgcttatcagcttaaggagattttgggctgagacgatggggttttctaaatatacagtcatgtcatctgcaaacagagacaatttgacttcctgttttcgtgattgaatagcttttatttctttttttaaatatatatttttattatactttaagttctagggtacatgtgcacaatgtgcaggtttttacatatgtatacatgtgccatgttggtgtgctgcacccattaactcgtcatttacattaggtatatctcctaatgctatccctcccccctctccctaccctggtgtgtgaagttccccttcctgtgtccaagtgttctcattgttcaattcccacctaygagtgagaacatgcggtgtttggttttttgtccttgcgatagtttgctgagaatgatggtttccagcttcatccatgtccctacaaaggacatgaactcatccttttttatggctgcatagtattccatggtgtatatgtgccatgttttcttaatccagtctatcattgttggacatttggtttggttccaagtctttgctattgtgaatagtgcckcaataaacatacatgtgcatgtgtctttataacagcatgatttataatcctttgggtatatacccagtaatgggatggctgggtcaaatggtatttctagttctagatccctgaggaatcaccacactgttttatttctttctcctgcctgccagctcctcctggtacctctgatagaattcagctgtgaatatgtctggtctgtggcttttcttgcttggtacactattaattattgcctcaatttcagagcctgttattggtctattcagggattcaacttcttcctggtttagtcttgggaggttgtatgtgtccaggaatttttctatttcttctagattttctaatttatttgtgtagaagtgtttatagtattctctgatggtagtttgtatttccgtgggattggtggtgataccccctttatcattcttattacatctatttgattcttctctcttttcttccttattagtctgctagtggtctatcaattttgttgatcttttcaaaaaaccaattcctagattcattgattttttgaagtttttttttttgtgtctctgtcgccttcagttctggtctgatcttagttatttcttgcgttctgctagcttttgaatgtgtttgctctggcttctccagttcttttaattgtgatgttagggtgtcgattttcagtctttcctgctttctcttgtgggcatttagtgctataaatttccctctacacactgctttgaatgtgtcccagagattctggtatgttgtgtctttgttctcgttggtttcaaagaacatctttatttctgccttcatttcattatgtacccagtagtcattcaggagcaggttgttcagtttccatgtagttgtgcagttttgaatgagtttcttaattctgagttccaatttgattgcactatggtctgagagagtttgttgtgatttctgttcttttacatttgctgaggagtgccttacttccaactaagtggttaattttggagtaagtgcaatgtggtgctgagaagaaagtatattctgttaattttgggtggagagttctgtatgtgtctattaagtccacttggtgcagagctgagttcaagtcctggatatccttgttaaccttctgtctcattgatctaatattgacagtggagtgttaaggtctcccattattgtctcccattattattgtttgggagtctaagtctctttgtaggtttctaaggactcgctttatggatctgggtgctcctgtattgggtgcatatatatttaggatagttagctcttgttgttgaattgatccctttaccattatgttaacggccttctttgtctcttttgatctttgttggtttaaagtctgttttagcagagactaggatagcaacccccggtttttttgctttccatttgcttggtagatcttcctccatccctttattttgagcctatgtgtgtctctgcatgtgagatgggtctcctgaatacagcacactgatgggtcttgactctttatccaatttgccagtctgtgtcttttaattggggcttttagcccatttacattgaaggttaatattgttatgtgtgaatttgatcctgtcatcatgatgttagctggttattttgctcattagttgatgcagtttcttcatagcatcgatggtctttacaatttggcctatttttgcagtggctggtacyggttgttcctttccatgtttagttcttccttcaggagctcttgtaaggcaggcctggtggtgacaaaatctctcagcatttgcttgtctgtaaaggattttatttctccttcacttatgaagcttagtttggctggatatgaaattctgggttaaaaattcttttctttaagcatgttgaatatcggccccctctctcttctggcttgtagtgtttctgctgagagatctgctgttagtctgatgggcttccctttgtgggtaacccgacctttctctctggctgcccttaccattttttccttcatttcaaccttggtgaatctgacaattatgtgtcttgggattccccttctggaggagtatctttgtggcgttctgtgtatttcctgaatttgaatgttggcctgccttgctaggttggggaagttctcctgcataatatcctgaagagtgttttccaacttggttccattctccccgtcactttcaggtacaccaatgaaacgtagatttggtcttttcacatagtcccatatttcttggagactttgttcatttctttttactcttttgtctctaaacttctcttctcacttcatttcattcatttgatcttcaatctctgataccctttcttccagttgatcgagtcagctactgaagcttgtgcattcgtcacgtatttctcatgccatggttttcagctccatcaggtcatttaagatcttctctatgctgtttattgtaattagccatttgtctaatcgtttttccaggtttttagcttctttgagatgggttcgaacaccctcctttagctcggagaagtttgttattaccaatcttctgaagcctacttctgtcaactcattaaagtcattctccatccagctttcttcctttgctggcgaggagctgcgatcctttggagaagagtcgctctgatttttaaaatttttggcttttctactctgttttctccgcatctttgtggttttatcaaactttggtctttgatgatggtgacctacagatggggttttggtgtggatgtcctttttgttgatgttgatgctagttttgttgatgctttgttagttttccttctaacattcaggaccctcagctgcaggtcttttggagtttgctggaggtctactccagacgctgtttgcctgggtgtcaccagcagaggctgcagaacaacaaatattgcagaacggcaaatgttgctgcctgatccttcctctggaaccttcatctcagaggggcacctggctgtatgacgtgtcagtcggcccctactgggaggtgtctcccactgggctactcaggggtcagggacccacttgaggaggcagtctgtccattcccagatctcagactctgtgctgggaggaccactgctctcttcaaagctgtcagacagggacgtttaagtctgcaggtttctgctgccttttgttaagttatgccctgcccccagaagtggagtctacagaggcaggcaggcctggttgagctctggtgggctccacccagtttgagctttctggccgcttcgtttacctagtcaagcctcagcaatggcagacgcccctcccccagtcttggggccgtcttgcagtttgatctcggactgctgtgctagcagtaagcaaggctccataggtgtgggaaccgccgagccaggcacgggttataatctcctggtgtgccgtttgctaagaccattggaaaagcgcagtattagggcgggagtgtcccgagtttccaggtaccatctgtcacggcttcccttggctaggaaagggaattccctgaccccttgtgcttccagggtgaggtgatgccccgccctactttggctcacactccatggcctgcacccactgtccaacaagtcccagtaagatgaacccagtaccttagttggaaatgcagaaatctcctgtcttctgcgtcactcacgcagatgcatgagctgtagactagagctgttcctcttcggccatcttgtaacgatcctgctagggttttttcaaggatagtttggcagggagagagatgacaaargaatgagtgctgctgattggttggcggtgcaatcacagaggtgtgggaaatgatccttatgctgagtccacttctgggcgaaggccgcaggacwggttggcaggtcaggtggtgccatctggttgtcagaattgcaaaagcctgaaaagacatctcaaaaggccaacctcaggatctataatagtgatattacctgcaggagtaattgaggaagttgcgaatcttgtgatttgcagaataatgactggtaattgttcacatctatgtcttagtagaattgaggctcctctcattctcccattctggtggtctttcattagttttacgaaagtagtttagtttgggggaagggctattatcatttaaactacaaactaaatttcttccaaagttagcttgacccaatcccaggaatgactaagggcatttggagggtaaaggcaagatgcaggctggttggatcagatctccttcactgtcataattttctcactgttttaagttttgcaagggtggttgcatagggtttatttctgggctctctattctagtccattggtctatatttctgtctttatgccagtaccacattgctttgattaatgtagctttgttataagttttgaaattggaaagtgtgacttacttattcttttcaagattcttttggctattcagggtgccttgagattccatgtgaattttaagatgtattattattctgttactgcaaaaaacatcattgggattttgatagagattgcattgactctgtagatcttctttagtagttttgacatttagcaatattaactcttccaatccataaatatggaattttgttccatttatctttgtggtctttaatttctttcaccagtgtttcatagtttttagtgtatatggtttttgcctccttggttaagtttatttatgattttttatgctggtaggttttattttttaaattttgggggaagtgttttattaatacaaatgtatgggttacaagtgcaattttgttacatgtatagattgtatagtggtgatgtcaggacttttatggtatccatcactcaaataacttccattgtacccattaagtacaccccactcccacctgttaagttttaataagttggtttagtctctgttctgtctctgaaaaatgtcagatactactaacagaactaaaaaatccaggactgagagaaactttaagtacatacaacaatataaacagatcttaaaaatatgatacagcatagaaaaatggaaaccaaaacatattccacaatgtcattcagtacttttaaattactacacagaaagtgttatacatttcacaaaaatgtataagaatagcacacacaaattatcaacaaaataatacagggttttctgaattgtctacctgtgagatgtttctaagcagggttttattattgattgattgattgagacagggtctgactctgtcgcccagattggagtacagtggtgcaatcctggcttgacctcctggctcaagtaatccttccacctcagcatcccaagcagctgggactataggttcacacaaccatgcctggctacttctttaaaaaaatttttgtagagagtctcactacactgctcaggtggtctcaagctcttgggctcaagcaattctgacacctcagcctcccaaagtgcagggattacgggtgtgagccgttgcacctggactaagcagggttttaagtgacttggttcttgtttatgttgacactaaacatgcatcaaagattaaccttctaaattctggaacacagaaagaagggcagcccttatttcagggctgggctgatgatagaatttacttgatgcagtttttcatagaaagatatgtgtctttttgttttaaacatataagaaaagagtttccactgtttacctggtactaggtcccaatgtctaaaccaagtttggagaatcacatcctctgagcagcctatgttgatgatgatgctgatgacaatgatgacagaagacacttatatggtacttatttatgtagcagaaccatagtcctttatatgttttaactcatttaatattcaaaacaaccctatgacatggtacattgatgttgttatacccatttatatgtgtggaaatggtcatacagtgtcttattaatttgcctgaggccacacagctaattagtggtggatctgaggttggatttctaggagccagattcacaaatccaacactgcactttgctttttctctattgtctatcgctcattgatttttttattctcaattttatttccttcctttatttttggtttaattttctcttctttttttagtttcttgagatgaaaacttagatctttgatttttctacctctcttcttttcaatatttattatgcttaaagctttacacttcamcctaggcattgtttttgttgcatcccacatattttgatgctgtatttttatattcagaatattttctaatttatatttatttgttcattttaaaaataattttactaaataatataaaatgctaattttgaaatacttaggattttcttacatttggttttgatttctaatttaattctatgtggttttaaaatatagtttcactcaattgaaatttattgatttactttatattcctgcatatggttgatactggtgcatgttgcatgtacacttaaataacatttattctgcgattgttggatacagtgttctatatttgtcarttagattgagtgctgctcagatgttctrtattcctacagatatttcatgtgcttattctataaaatacaaattgttaatgtttctgattaggactagaagacttttcttttaccttttaaatatattttttattttatgtattttgaaactatgttatttggtgcctatacacttagatttttttcttgaggaattgatcctttatcattatgaaatatccttcaggcaccccgctcccacagatgtatgcatcttgctgtacccctgcttctgctggcacaaatgcacaggcatggatcctgctgccaccaccttgatgaagtgtgtggccagcacccccatcagagtactgttaccagcatactgggaataccttgcccccagagtgcagcagctttctaacctctatggggcagagaacaaagttggggggcccagtaccagcccatcagcgttacatcacatagcccatgagtgatgagctgagccttggtgccctgaaagcatycagaatgaagccagtcaactgaaccgacattataccacaatcaaaccctcaagaatatcaaagaatataaaagtaaaaagccctatccaaaggatagcaacttcaaagattaaaggaatgtcagcccacacagatgagaaagaatcaatgcaagaactctggcaattcaaaaaactagagtgccttcttacctccagacaaccccactggttccctagcaatggttcttaacaaaactgaaatgacagagatagaattgagaatctggatagaaaaaagatcattgagattcaggagaaagttgaaacccaayccaaggaatctaaggaatccaataaaacaatacaagagatgaaacgaaatagccattttaagaaagaaccaaactgaactgatagagctgaaaaactcactacaagaatttcataatgcaatcacaagcattgttaacatcagaatagactactaacatcagaatagaccaagctgaggaaagaatctcagagcttgaagactggttcctcaaatcaactcagacaaaaataatgaacarataattaaaaagagtgaacaaaaccactgagaaatatgagattaggtagagaccaaatctgtgactcattgacatccctgaaagagagagagaaaaagcaatttttccagccttgctagagaggccaaaattcaaattcaggaaatgcagaaaacccctgtgagatactatacaagacaaccatccccaagacatgtaggcatcagattctccaacgtcaacatcaaagaaaaaatactaaggcagctagagaaaaggggcaggtcacctacaaagggattccgatgaggctaacagaagacctttcagcaaaagcactacaagccaggagagatttggagacctatgttcagcaaaaaaaattccaaccaagtatttcctgtgcagcaagactaagcttaataagcaaaggagaaacaagatccttttcagacaagcaaatgctaagagaattcattaccaccagacatgccttacaagaggtccttaagtgagtgccaaatatggaaacaaaagactgttactggccaccacaaaaatatacttaaggactagacctctgaacactataaagcaattacgctatcaagtctgcataatatccagctgacatcatgatgacaggatcaaatcaacacatataagtattatccttaaaagtaaacatgcaaaatgcctgacttaaaaagtacagaatggcaaatttgataaagaaataagacacatggagagttgctccaaatggcaggataggaacagttctggtctacagctcccagcaagatcaatgcagaagacaggtaatttctgcatttccaactgaggtacctggttcatctcattgggattggttggacagtgggtgcagcccatggagggcaagccgaagcagggcggggcatccctcaccgaggaagtgcaaggggtcaggggatttccctttcctatccaagggaagccatgagtgactgtacctagaggaaaagtacactcctgctcaaatactgcacttttcccacggtattcgcaacaggcagaccggragattccctcccatgcctgctcggtgggtcccacgctcatggtgccttgctcactgctagcacagcagtctgagatcgacctgggatgctggagcttggtgggtggggagcggcgtccaccattgctgaggcttgagtaagcggttctatgctcacagygtaaacaaagcagcagggaagcttgaactggayggagcccactgcagctcagcaaggcctactgcctctgtagattctacctcgggggcagggcatatctgaaaaaaatgccgcagacagcttctgcagacttaaacatccctgcctgacagctctgaagaaagcagtggttctcccagcacgggggcgttcaagctctgataacggacagactacctcctcaagtgggtccctgacccctgtgtagcctgattgggggatacctcccagtaggggccaacagacatctcatacaggygggtgcccctctaggacgaagcttccagaggaaggatcaggcagcaatatctgctgttctgcagcctccattggtgataccgaggcaaacggtctggagtggaactccagcaaactccaacagacctgcagctgaggggactgtctgttagaaggaaaactaacaaagaggaatagcatcaacatcagcaaaaaggacatccacacgaaaaccccatccgtaggtcaccaacatcaaagaccaaaggtagataaaaccacaaagatggggagaaaccagagaagaaaggctgaaaattccaaaaccagaacgcctttcttctccaaggatcacaactcctcgccagcaagggaacaaaactggacagagaatgaatttgatgagttgacagaagtaggcttcagaaggtcggtaataacaaacttctccaagctaaaggagcatgttctaaccaatcgcgaggaagctaaaaaccttgaaaaaatgctagatgaatggctaactagaatacaataaccagtgtagagaagaatataaatgacatgatagagcttaaaaccatagtacaagaactttatgaaacatacacaagcttcaatagctgattcaatcaagcgaaagaaaggatatcagtgattgaagatcaaattaatgaaataaagcaagaagacaagattagagaaaaaagagtgaaaagaaacgaataaagcctccaagaaatacgggactatgtgaaaagaccaaatctacgtttgattggtgtacctgaaagtgacagggagaatggaaccaggttataaaacactcttcaggatattatgcaggagaacttccccaacctagcaaggcaggccaacattcaaattcaggaaatacagagaacaccacaaagatactcctcgagaagagcaaccccaagacacataattgtcagattcaccaaggttgaaatgaaggaaaaaatgttaagggcagycagagagaaaggtcgggttacccacaaagggaagcccatcagactaacagcagatctctcagcrgaaacactacaagccagaagagagagggggccgatattcaacatgcttaaagaaaagaatttttaacccagaatttcatatccagccaaactaagcttcataagtgaaggagaaataaaatcctttacagacaagcaaatgstgagagattttgtcaccaccaggcctgccttacaaaagctcctgaaggaagaactaaacatggaaaggaacaaccggtaccagccactacaaaaacatgacaaattgtaaagaccatcgatgctatraagaaactgcatcaattgatgggcaaaataaccagctaacatcataatgacaggatcaaattcacacataacaatattaaccttcaatgtaagtgggctaaatgccccaattaaaagacacagactggcaaattggataaagagwcaagacccttgactgtattcaggagacctatctcacatgcaaagacacacataggctcaaataaagtgatggaagaagatctaccaagcaaatggaaagcaaaaaaaagggtttgccatcctggtctctgatgaaacagactttaaagcaacaaagatcaaaagagacaaagaaggccgttaacataatggtaaagggatcaattcaacaagaagagctaactatcctaaatatatatgcacccaatacaggagcacccagattcataaagcaagttcttagagactaagtctacaaagagacttagactcccacacaataataatgggagactttaacaccccactgtcaatattagatggatcaacgagacagaaagttaacaaggatatccaggacttgaactcagctctagagcaagcagaactaatrgacatctacagaactcttcttcccaaatcaacagaatatacattctcctcagccccacatcacacttattctaaaattgaccacataattggaagcaaaacactgctcagcaaatataaaagaacagaaattacatcaaactgtctctcagaccgcaatgcaatcaaattagaactcaggattaagaaactcactcaaaactgcacaactgcatggaaactgaacaacctgctcctgaatgactactgggtaaataacgaaatgaaggcataaataacaatgttctgtgaagccaataagaacaaagatacaacgttcaagaatctctgagaaacatttaaagcagtgtgtagagagaaatttacagcactaagtgtccacaggagaaaacaggaaagatctaaaatcgacaccctaacattgcaattataaaagaactacagaagcaagagcaaatgaattcaaaagctagcagaagacaagaaataaatcagagcagaactaaaggagagagagacacaaaaaacccttaaaaaaaatcaatgaacccaggagctggttttctgaaaagagcaacaaaataattacatgacaagcaagactaataaggaagaaaagagagaagaatcaaatagacgcaataaaaaatgataaaggggatatcaccaccgatcccacggaaatacaaactatcatcagacaatactataaacacctctacgcaaataaaatagaaaatctagaagaaatggaaaaattccttgacacatacaccctcccaagactaaaccaggaagaagttgaatctctaaatagttcagtgacagcttctgaaattgaggcaataattaatagccaaccaaccaaaaaaagtccaggaccagacagactcacagccaaattctaccaggggcacaaagaggagctagtaccattccttctgaaactattccaatcaatagaaaaagagggaatcttccctaactcattttataaggccaacatcatcctgataacaaagcctcacagagacacaacaaaaaaagataattttaggccaacatccctgatgaacatcgatatgaaaattttcaaaaaaaaatactggcaaaccgaatccagcagcccatcaaaaagcttatccactacgatcaagtcgacttcatccctgggatggaaggctggttcaacataggcaaatcaataaatgtaatccatcacataaacagaaccaacgacaaaaaccacatgattatctcaatacatgcagcaaaggccttcaacaaaattcaacagcctttcatgctaaaaactctcaataaactaggtattgatagaatgtatctcaaaacagtaagagttatttatgacacacccacagccaatatactgaatgggcaaaaactggaagcattccctttgaaaactggcacaagacaaggatgctctctctcaccactcctattcaacatcgtgttggaagttctggccagggcaataaggcaagagaaataaataaatggtattcaattaggaaaagaggaagtcaaatagtctgtttgtagatgacatgattatatatgtagaaaaccycatcgtctcagctccaaatctccttaagctgataaacaacttcagcaaagtatcaggatacaaaatcaatgtacaaaaatcacaagcattcctatccaccaagaacagacaaacagagagccaaatcatgagtgaactcccattcccaactgcctcaaagagaataaaatacctaggaatccaacttacaagggatgtgaaggacctcttcaaggagaactacaaaccactgctcaatgaaataaaagaggatacaaacaaatggaagaacattccatgctcatggatagggagaatcactatcatgaaaatggccatactgcccaaggtaatttaaagattcaatgctatccctatcaagctatcactgacttcacagaattggaaaaaaactactttaaagctcatatggaaccaaaaaagagcccacatagccaagacaatcctgggcaaaaagaacaaagctggaggcatcacactacctgacttcaaactacactacaaggctacagtaaccaaaacagcatgttactggtaccaaaacagacatgtagaccaacggaatagaacagaggcctcagaaataacaccacacatctacaaccatctgatatttgacaaacctgacaaaaacaaatcgggaaaggattccctatttaataaatggtgctgggaaaacaggctagccatatgtagaaagctgaaactggatcccttccttacaccttatacaaaaattaactcaagatggataaaagacttgaatgtaatacctaaaaccataaaaaccctacaaaaaaacctaggcaatacccttcagtgcataggcatgggcaaagactttatgactaaaacaccaaaagcagtggcaacaaaagccaaaattgacaaatggcatctaattaaactaaacagcttctgcacagcaaaataaactaccatcagagtgaataggcaacctacagaatgggagaaaaatttttcaatctatccatctgacaaagggctaatattcagaatgtacaaagaacctaaacaaatttacaagaaaaaaaaaaccactgcatcaaaaagtgggcaaaggatatgaacagacacttctcaaaagaagacagttatgcagccaacagacatatgaaaaaatgtccatcatcactggtcatcagagaaatgcaagtcaaaaccacaatgagataccatctcatgccagttagaatggcgatcattaaaaagccaggaaaccacagatgctggagaggatgtggagaaataggaacacttttacactgttggtgggagtgtaaattagtgcaaccattgtggaagacagtgtggcgattcctcaaggatctacaactataaataccatttgacccagcaatcccatttgtgggtatatacccaaaggattataaagcattctactataaggacacatgcacacatatgtttattgcagcactatttacaatagcaaagacttggaaccaacccagatgtccatcaataatagactggatatatagtattctatgtctggttaaaaaaaaagttattcaattttatggatttggattaggatcattcccatttctgtaaatatttacacctataaggatatcaagaaggaatgtcaggcagtttactagtaacttttcaaagtcttagaaaagttgcattttttgctggcaccaagaggggaaaacatcataaaaatagtttcaaaatctacaatcaatgctttctccaaaataaatgtctttgttaaaaaaaataataataatagactggataaagaaaatgtggcacatatataccatggaatactatgcagccataaaaaaggatgagttcatatcctttgtaggtacatggatgaagctggaaatcatcgttctcagcaaactatcacaaggacagaaaaccaaacaccgcatgttctcactcataagtgggagctgaactatgggaacacgtggacacagagaggggaacatcacacaccggggcctgtcagagggtgggggactgggggagaggtagtgttaggagaaatacctaatgtaaatgacgagttgatgggtgcagcataccagcatggcacatgtataaccacgtaacaaacctgcatgttgtgcacatgtacccttgaatttaaagtataatttaaaaaaagaagaagaaataagtcacaattgtatgctgtcttcaagagacccatctcatgcagagctacccataggctcaaaataaaggtttaaagaaaaatctaccaagtaaatgggaaaagaaaacaggagttactattctaattttagacaaagcagactttaaagcaacaatgatcaaaaaagacaagsgcatgacataatcataaagggttcaattcaacaagaagacttaaatatcctaaatatatgtacccaacacaggagcttgcagattcatagaacaaattcttagagacctacaaagagacatggataaccacacggtaatattgggagacttcagcaccccactaacagtattcaatcatcaaggcagaacactaacaaagatacttgggacctgaactcagtatttgactaaatggacccaacagacatctacagaactctgcactccaaaacaacagaatatacattcttctcatcgccacatggcacatactctaaagtcgaccacacaatcggccataagtcaattcttagcaaattaaaaacacaagaatcacactaaccacactcttggaccatggygcaacaaaagtagaaatcagccccaagaagatcattcaaaacatacagctacatgcaaatcaaacaacctgctcctgaatgacttttgggtaaacaatgaaattaaggcagaaatcaagacattttttgaaactattgaaaataaagataaaatatacgaaaatatctgagacacagctaaaataaagataaaatataccaaaatctctgcgacacagctaaagcagtattaagagggaagtttatagcactaaacacccctatcaaaaagttagaaagatctcaaattaacagcctaacattgcacctagaggaactagaaaaacaagagcaaaccaactgcaaagctagcagaagaaaagaaccaaaacaagaactgaactgaatgaaattgagacaggaaaatgatataaaagaccagtgaaaccagaagctggttctttgaaacaataaataagatggatagaccactgattatactaatcaaaaaacagagcagatccaaataaacttaatcagaaatgacaaagaggacattaccatcaacccaacagaaatataaaaaaccttaaaagactattacaaacacctctatgcagacaaactaaaaaacctacaagaaacgataaattcttggaaacatacagtctcccaagactgaacaaggaagaaattgaaaccctgaacagaccaataacaagttccaaaattgaatcagtagtaaaaagcctaccaaccaaaaaagccctggaccagatggatccacraccaaattctgccagatgtataaagaagagctggtaccattcctactgaaactattccaaaaaattaaggaggagggacccctccctaactcattctataaggccagcatcatyctgatataaggccagcatcatcctgatataaggccagcttcatcctgataacgaaaactgggagagacaacataaaaagaaaacctcaagtcaatatcctggacaaacatagatgcaaaaattctcaataaaatactagcaatctgaattcagcagcacatcaaaaaactaatccaccatgatccaagtaggctttatacttggcatgtgagattggttcaccatatacaaatcaataaatatgattcatcacatgaacagaactaaaaagaaaaaccaaatgataatctcaatagatgcagatacatctattgaatgcaaaattcagtaccccttcatgttagaaaccctcaacaaactaggcatcaaaggaacatacctcaaaataataagagctatctgtgaaaaaatcacagccagcatcatactgaaagagcaaaagctggaagcattccccttgtggaataagacaaggatgcccactatcaccactcatattcaatatactactggaagtcctaggcagagcagtcaagcaagacaaataaagaaaaggcatccaaataggaagagaggaagtcagacaatatgattttatacctagaaaattccatagtgtctgcccaaaagctcctagatctgacaaacaacttcagcaaagttgcagtgtacaaaatcactgtgcaaaaataagttgcattcctttacactaacaacatccaagctgagagccaatcaaggacacaatcccattcataatagccacacaaaaaataaaatacctacgcatacagctaaccagagaggcaaaatatttctagattgagaattacaaaacagtgctgaaagaaatcagacaacacaaacaaacgagaaaacattcattccatgctcgtggataggaagaatcaatgttgttaaagtggccatactgcccaaagcaatttacagattcaatgctattcctttcaaactaccagtgatatttttcacagaattagaaaaaactattctaaaattcaggtggaaccaaaaaagagcctgaatagccaaatcaatcctgagcaaaaagaacaaaactggaggcatcacattaccaaaattcaaactgtactgcaagcttacagtaacaaaaacagcatggtacttgtacaaaaacagacacataaaccaatggaatagagagcccagaaataaagctgtgtactcagaaccatctgatctttgacaaaattgacaaaaacaaacaatggggaaaggacctgctagtcaataagtgattcgggatggatcgctacccatatgcagaagattaaaactagaccacttcctatcaccatatataaaatcaactcaagatgtattaaagacttaactgtaaaaactataaaaccctagaggaaaacctaggaaataccattctggacatagtccctggcaaagatttcatgatgaagatgccaaaagcaattgcaacaaaaaaacggcaagtgggacctaattaaagatcttctgcacaacaaaaagaaactatcaagagagtaaacagacaacctatagaatgggagaaagtatttgtaaagtatgcatctgacaaaggtctaatatccagaatctataaggaacttaaacaagtttacaagaaaaaaaaatttttaaagtagctaaagtaaatgaacagacacttttcaaaagatgacatacatgtgaccaacaagcatatgaaaaaatgcccaacatcactaatcattagagaaatacaaattaaaaccacagtgagataccatctcacaccagtcagaatgggtattattaaaaagttataaaatagcagatgttgacgaggttatggagaaaagggaatgcctatacgctgctggtggaaatgtaaattagttcagccattgtggaaaacagggtggcaatttctcaaagtacttaaaacagaactaccattttacccagccatccacttattgggtatatgcccaaaggaatagaaatcattctaccataaagacacatgcacacacacgttcatcgcagcactattcacagtaggaaagacatggaaccaacttaaatttccatcactggtagattggataaagaaaatgtggtacatatacaccatgtaatactacgtaaccataaaaaaagaataagatgatgtcctttgcagcaacatggatagtgctggaggtcaatactctaagcgaactaatgtaggaacagaaaaccaaatgctgcatgttctaacttataagtggaagctaaacattgagaacacatggatacaaagaagggaataatggacactggacctacttgagggtggagggtaggaggaggatgaggagagaaaaaatgacctaatatgcttattacctgggtgatgaaaatctgtacaccaaacccccacaacatgcaatttattgataacaaacctgcacatggacccctgaacctaaaataaagtcttaaaaaaagaagaggggccgggcacagtggctcacgcctgtaatcccagcactttggaaggctgaggcgggtggatcaggaggtcaggagattgagaccatcctggcyaacacggtgaaaccccatctctactaaaaatacaaaaaattagccgggtgtggtggtgggcttttgcagtcccagctactcgggagactgaggcaggagaatggcatgaactcgggaggtggagcttgcagtgagctgagatcatgccactgcactccagcctgggcaacaaagcaagactccgtctcaaaaacaaaagaaaaacaaaaaaacaaagaggaggaagaggaaaataaggcccatggtgcttaaagtcacacatgtgccaaagccagctagtaaacaaagcaaagatctgaattcagatatttgtttaactgctgtggttctaattatatcacgcaccttggactcaaagcaggatagagaaggttgggcagtggatcacaaaagatatcagcataaatacacatcatttattctgtattatctgatgccaagcagtgtgctaagcactttacatacatcatcttatttgtacatcccaattaccttctgatacagctgtcaattcccacttttatcaggaaactgaggatcaaagagggtaagtaatacatccagagttacaaagctgttaaaaatattagagggtctgactccagtgtatatatttttaaaagccccttattatctctggtaatcactgtcttgaaaactactttgtctgatattaataaagccacagtagctttcatacaccttcttgtttacatatgatttcccatattcttttatcccatctatgttattaaaatgtgtcttgtcaatagtatatagtttgttcttgtttctttattcattttgttttcctgatactcttttcccaattaaggaggtaataatctgtaagcaaagccttatttacataaacactgctgtgatcttataccaaataaacagccctagcatgtgtgtgtgtgtgwgwgagagagagagtgtgtgaatgtgtgtgtgtttgggctttctgaattagattttctttcaagatccacctacatctttacttttggcctaagtaatggttggtcatgttaactgtgtaaaatattratctttttctgaagctacaaagagtccatgtctacttactgttctagkaaaagttttttcaaatttgggaagtgtctaccttttaaaatattttctgrgagtgtttaattacttctatgatcttaaaaggttctctccattttacttttatccagctgtcacatattctgagtatgttttccaccaggagaacctgagaatttttttttctcttagattttgagtatagagataagattttatcctgcatccagttccaacctgttaatataattctatgcaagtttcctctcttgttgtgtttatttccctttatccttatccttagtcatctattccaatgtttatgctgtgcattattatattttcatgtatccttgtgaaatgtagagtgctttatgtgcaatattttaaatgtacataaatggcattatagattaaaacattttttcatgttgtaccatgtttttgaggtttatttatattgctatgtatacctctagtctactgcttctaactgtgaaacatttttttcaaattcaaattctcataaatgctgtayttattttggaaattagaattcagcacaaggtacttctctgtattcaacaccatagcattttagcgctttactaatgggtggaaaaattaaacttcagtcctactgttcaaagagcctatttagtcaaagatggccaagatggaaagcttccactttcctgtgagtcaggtcctagtaaatgtgaatcttacacagagatgattagttatagctcctagcactaactccctggaggcaatgtccttggtgcccctgactctcttccatttaggcactcatctttgttagatgccttaggtttatttacgtaaaatcatgctgcacttctccctgatactgtggttaaagtttttatggccttgcaccaaaccaacagcccagaatagctacatgccagggagatattgtcagcaaggtttgggcattaatatgaagaatcttgtatattgttgaaacttctggtccaacagaatggaaagtgtgccaaataggaagcttttgggtacaggtgacaaaaaccccaactcaaactggcttcaacgctaagcacatatattatctcactatattagcagaataactaaatattggcagctgcagaggcaaaccctgactactgagaggcttgatacagtaaaagcttattgcttggtctcacaaagtttgccaggggttggtgactctcctgggcagttagtgactcagatatgtcgctttataagcaacacatgacttgtaaagtcacccctgcaagggaagaggactggtggatcacatagattgtttttaaggaccaggctggaaattgacttatatgaattttgcccatgctccagtgtgcataaatccgtcatcagtcatatgaccccatcctaactgcaaaggatgcagaaacatggagtcttcctgtgaacttaggaagaggaaaagtgttgagcaagaagccacattccataacaggaagtccagatatacagcaggttttagggatggatgacttagtgactcagtggtgtcatcaccgtcctgaagtctttccaatgctctccaccctgccgtcctcacaatgtcagctttgtcttcaggctggttctcttcctggttgcaaggtggctgctgtagttcagccatcacaaccagacatggcaatgtgctgggacagaaagggaccatccttaggagtgagggcacttttcccagaagcagcccagcacacttcctctgatggccaggactgccaggcccaaactaatcactgacaactcaagatttatccctggcattgagagaccatcaccctcttggcagtcatgtgggggaagggctggttaccatttgaaccaaaatgaagcttagccaataaggaagagaagaaagtagatgttgagtaggcaacgaacagtatctgctatagcccatccctggactcgctgaggtttcatggtaaagtttgtggttttcatcatgttcctgcaccattctcagtaagttgatgcctagcattgcatattttcttttgctattgtaatgctgtttccatgatagttgcttgtgtataggattgtcattgatttttcactcacctttgttcagttttcttttatctatgtgtctgtgtaattgccttaaattcttttttcaagcagtattagatgttaattagagactgagaaacccagaggtggaaggatcttaagtggagcaggggatcggaktaaagaataagaaagcaaagaatactgtatttcatttctgtgaaaagagaggttacatttccttgcatgaggaaaaagtaggagtgtgtgcttttctcaaaacttgctataaggctgggtgcagtggctcatgcctataatcagcactttaggtggccaaggcaggaggattgcttgagcccagragtttgagaccagcctgggaaatctagtaaagccctgtatctacaaaaaataaaaaattagctgagagtggtggtgcacgcctgcagtccccagctagctgggaggctgaggcaggaggattgcttgagcccaggaggaggtcaagcttgcagtgagctgtgatcatgccactgaactccagtctgggtgacagagtgagactctgtcttaaaaaaaaattgctatgagagaatgctctaggtatgtgtgtggtcgtggtagagtataggggtgtacgatcactgtaatgtgctgraatagtacctaattttgaaactgcatggttaataacatcttttaagaatgtctaagtgctttagagacttcttttcccccattctccgtgagaagaataggagatagatcgttggttttcgtgtggaaaaattaagaaagagaaatgaagcagtttaaatttcctcacattatcatggtattaagtaaactagagcagaggtctttgggttagaactcatttgggaaaatagattgagtgtggccaaggcaaccattcctgtagtgaactcagctcccttttatgtagtgaagataaatagttgaacaatccaatacatgccccagtccctctctctctacacacactgcacacacacacacatacacacacacacacacacagtgccaggagacattccgggaccatatttttttaagaagaaaaagtattattatgctttcaagtcagttatgttaatttattccttttttgagatgtagagtagctcctttgtatctgagtttgcctattacatgaaaagactagtggataatgataccagctatcctatgttacaaaaagctgcagatccccatgccaagtggactatacagctacacaaaccttctgttacctgttggacacactgccacagaggcgagcaacatgctgtctgccattaaagaactcgggacccttgaaacccattttggggaatatatgtagcaaataatccaattttaaaaggggcaaaaacgtaggttatcggagtacattagacatgctaatctgcagcagttttgtgcaaacctaagtataatttaattttgtattaagttttccttttgatatccagataaagattaacatagtcattggcaattatatttgtattttcaataaacatcacattttactgaagtatacagatctatgcaagggatagtgaaatagacaaagctcatttgacttttccagaaggaatgcattttaacattggtggctcctgtggttagggggacttccaaagcagtaactcttgcgtttcctcagcagcatcatcataattacaccactatacacaataattatactcctagctgtggttctattctacagcagttgctgctttcctggaaaccttggggaaaatagaaatttaaatagctcatagatttggctatgataagttcacacaaagacaaaattgcatttggcagtttagtttccccaacctttatttgtttcctgataactatatttagtctgaacctctttgtcaaggacaccacatagkttatattgtcttcctctttgcatccaatgargcagcatatattgccaggtcatttttttttatggtgatgccaaacttgaccacttggccaagggagtgactgccatacctcttattgtgaaggcacattttcctcctgtaattaacaagtaaccccaggggtgataccttgagacaatgagaatattttgttttccaataacttttacccaagaatagctacacacaccccctgtaattatagacttatgggtcagtttttctcaccatgtgttttaatccatcgatgtcattctttctgatatttaaaatcgttcacagattggccaggaacccttcagaccagcttctgtcttcattgaacttgtccttgtttagctttgagcacttcttggcgtttttggcccaagatatcttaggcttatctcgtactttcagtactctggacgtgtgtcagacctgaaatcagcctcttctccaaggagacctgtttccctttagtggaaaataatatttacaaaccaagagttgggtgtttgtgttttactgctactggggtgttaatttttctaggctctttaatygtgagttcatattgaaaccacctaattattttgtttttattttgaattacctttcttgaggtatagtttacctaaacgaaagtgtactcatttgaagtgctgagtttgcttcatgttagcaaattcatataccctgaactgtcaccctgtcacctatgaccttttgcagtcagccctctttcagcctctgacctgctttgtgtcactgtagattagtgtacctattctagaatttcatgtaagtggaataacastatatgaggccttttctctggctacttttactcagcattatgttttggaaattggtacatggtattatgcataccaattattcattactgtctcttactgaatagcartccattgtatgtatgttttgcttatctatttgtttatctatttacaagttgatgaacatttggaccatttccagcttatggatattatgagtgaarctgtttgaacattcaggcacaaggttttgtatggacatgagctttcatttctctgcagtaaatacctaggaaaggaattgctgtgtcatgttttttaactttataggaaactaccaattttttttcccaagtagttgttaccattttttactaccaccaagaatgtatatgagacctaattattccacattgtcatcagctcttggtattgccaatcttttcattttagccattctggtgggtcagtagtggctttaatttctgttttttaattttgtttaatttctgaaattttaattttattgtggttttaatttccatttctgtaatgggtgatgacacagagcatctttttgtgtgataattggtcattcatatatcttgatgaaatgtccattcatatctttcactgacttttttaattgggttgtcttttttcttgagctatgaagttctatgcattctgaatactagtgttttgtcagatgtatgtattaggatatgttctcccagtctacagattactttaaaaattttcctaatagtatcttttggagagtagaaaattttaattttgatgaagtccaatttatagatttatttaaggttcctattatttatgtcgtgtttaaggaagttttgcctaccctaagacctcaaagattttctcctgtattttcttctagaagtttgtaaacttaaaaactttagcttttgtgtttgggttcatggtcccattttaatttaatttttatgaattttgtgagatataggtgttgttctttttctttcttttttaattttttagttaataaaaatggtatatatttatattgtataacatgatgatttgatacatgtatacattgtggaatacatattacctcacatggttatcatttttttgtgataagaacacttaaaaatctgtctcagcaatttttaactatataatatattaactatagtcaccatgatatacaatagatctcttgaacttattccttctaagtaaaaatttgtcctttgaccaccagcccccctgccacccctcactccctgtccaacctctgataccaccattttactttctgtttctatgagtttgactttttaagattccatttatcagtgagaccattggtatttgtgtttcttagcctggtgaattttacttagcataatgtcttcccagtttttttatgttgttgcaaattacaggatttccttcttttctaaggcagaatagtaccctattgtgtttatgtgtatatatatatrtgtgtgtgtgtgtgtgtgtgtgtgtgtgwatatatatatatatatatcccattttcttaatccattcatctgttgataggcacttaggttgattttgtatcttggctattgtgaatagtgctgcaataaacatgggcattctctttgacatactgatttcatatcctttggatatatatgttcaataatggaattgctgcatcatttggtagctctatttttaatattttgaagagcctccatactgttctctacaatggctatgccaatttacatttctaccaaccatgtacaagggtccctctttctccacatctactttttttttttagcatggatgtccattcattccagccctgattgctgaagagactgtccttttcccccattgaactgccttggcatcttagccagaaatcgactgactatatgtaggaggaactatttctaaattctctagtctcttccatttatctatrtatttatccttacactaatgccacattgtcttgatttatatagctttataataagcagagcccagtcaggcccctcctagacagtccataccagaattcacaaatacatatgacctaaagcaagtaacataattaagtgaagctgttcttgtataagcagtattactttatttatattaaaatctaacgggctaaaatttcaacgtggttcattttcatttattaatgttttgagtcatgtccctttctcacatgtctcatggttcttattatggtttatttctaatgatatctttatacacatacttttcacactaaatatttaggaacattccctgttttcatacatagaacaatactgcctccatacatttttgaaatgcgtggcccatttgatctgtttttcagtttcccacttcaaagagaggaatacagtatctcccatgacagcatcagctggttaatgaatggtgattggcatgcagactcagcattgagactgcagtggggaatgatggggacactgtggcaaacgggggagggctggcactgctgagaggggcacagccactctacgccactttcataacatcatgtcaaatgtacacaaattcaccattatttattttgttgctcaaattattccagctttgtccactaggagctgtttcaattggctatgtccctttgacacacacaccartgtgggtttgttcggttttttgtcttatttgaatgcttctttcctttctggctcctccaggcttatcttgtgtatttcccatcccagtcctagaatcagccatttctctaagaatccctggtttcttttataagagaatggcattagaaaatgccacagaggttaagtgtcattcccatcacatcatagcaagggtacatactatcaacacgatttatgactatcgatgttacccttaatcatctagccaagatggatggtgaaatcattaggagggggatgcaataaagaggaagaaaagcagactttatgttcattttcaagcttgttccaaaggaaagttataggtgtatttgatcatataaatatcgttttgttttggaaaatcacgtttagggacaataaaattggaaagaatccttgcttccaaatcacctctgtgttcaaatcttcatcatatttgcactgccctttcctttgtgttcttagttcatgggtcccattggatttgatgggtttcgtttactttttgctactgaaattgttagtttaaaaaaacaggatacagagtgtcacattttttattgtaactccactttcttgaagttgcctatagcattttaaatttcagaagatcgataactttattcatttccctttggaaaaaataaaacaagattttaactagtggcatgtcttcaaggaagctaaagacatttaactttttctgttttgctctaagggcattctgatgattgcctgaatgtgatcttctgagtgttccagtccctggagctggctgttagccatctcccaaggagggtcgaaaagaacgtagcagaaagctgcagaaagaaaagctggctaaagaaacaggagctgccagccagggcaacatagtgagaccccaactctatagaaaatttaaaaagctgtcctggcatggcatgcctgtaatcttagctactcagaaggctgaggtgggaggatcacttgatcccaggagttgggggctgcagtgagtacttccagcctgggtgacagaggagaccctgactcaaaaaaaaaaaaaagagccggttgttgttaagggccaccagactggagtgcatggtagtcacctgcctccctcctttcctggagaagatgacaacgtgatgaacaagcaccactaccctggaatagtttaaatggcattcagcctggaggagtgtgcacatgcaccaaatatatcttgtgtgtcctttgtagccattgggtctatggagattactctggctgtgagtttggttgattaacattgctatgcaagccctgtccatttagctggaggttatcacaggaggaataaaccacagaatatgactttggcattgaataaatgggaagagagtgcttttgggggccagaactgtttgtaatattataactcctataaatacatgaattgctgcccctttatcataatatccattgctktaatgctctgttttagattggagttcacaccagacacctgagattgtgtttgttatgtaactgctatttcatgttgagaaagyagcaaagcttttaaatactgagaatattttagttacatgaagatacttttagtagtcactgttgttgttacattccccctacccctcagaaaataacagggctgttaaggaatcctcaaagagcatagattgagtgaaaatgacacagaacaaaggacagatcccaggagtgaaatgaagaagttctgtaaatagctgtgccgttttcctttgaaatgtctggcacactctatatagtayagtggtcgaggatagaggggctaattctgtgatgaagcattctgcatggaatttcagcagggcatagatggtgagggcatctggatctgtttgagtttttaaactaattatatgacaaactttttaaaatgtagcatacctggaaacatcatcccgccacgtcatctgcatttaaataatcattgcctcacctttaacacccagcctctagaaaaataaagcatgaacaaatgttagctctgagctgctctcagtaatttggagtgtgctaagcaaaacctacattttctagcatgaaattggcacaggaatgcatgcaaagttttgcttctttgattcatctggttacctagaacctgaggccattctgtattctgtggacaaaaccctatatacctttcatgacccagcttaaatgaaaagtctaatgcaaaacatgctgaatttctgtggccatatttaattgttctagtggtcccacaggtatagtttattattctttttaattccctttaatggcaatttctcttttccttttttaaaaatgtcttttgccttctgttcatttattacctgtctcccttttttattgtgagcatgtctcttgcacagcacagacacatagtgatttcttgttacatgtgggcccacatttattttttatttctatttgtttttcattcctatttatttatttatttatttatttatttattttgagccagggtcttgcttcattgtccaggccagagtgcagtggtgcaatcacatctcactgcaacctctacttcccgggctcaagcaatcctcccgcctcagcctcccaagtagctggaactacaggcacacaccaccaaccacacctggctaatgggcccatatgtaaatgactaattagtatttaaacacttgccaagagttgtttaatacctgctgtgtgcagggcacaatcttatacattcttaagggagcacagaggtgtcagatggggtctgcccaccagtttttcacagatttgaatatttagcgttctgggcaaaagcagtttaggagctgaaaaatcatggccattttaagaagattatcttacccaaaaacccacagtactattgttattgccttatatataaagccattctgttaattttttaaaagtatgtattaggtttaacctggtttctctgtgtttgccatgtttaacatctaaggccaaaaatttgaaatatttttactttctgagtatgtcaggaaagaggagtctgaagctggagtgagttggggaggtgggggggactatatttttatgaaaattttagtaaatttcctgggtttttgtcccacctatggggaagatctaggatacaaaagcattaaatgttaatattgattcaagaattaaatcatcaaaacattgctgggagaaattaaagacctaaataaatgtagagagatcatgtttatgggctagaaaactcaatattgttaagatgtcaccaaattaatatatagattcaatgcaatctctatcggaatttgctgaaattgaccaactgactctgaaattcatgtggaaataaaaaggatctataacagtcaaaacaaccttgaaaatgaaggataaagttggaggagtaatactatctgattataagacttattataaagctatggtaaatcaggatattgtggcattggtattaagatcactgaagagaccaatggaccagattagagcatccagaaataaacccatacatatatgcatagctgatttttgaaaaagttgtaatggcggctcagttgttccaggacaattagatatagttggaacaattagttatccatatacaaaaaaagaaaagaacttcaatcagttcctcataccatatataaaaattaactgaaaatggatcatagtctaaatatattacctaaaactataatacttgtagaaaggaggagaaaacccttgtaaccttgaattaggcaaatatatatatatatatttttttttttttcaagcagttctcatgcctcaccctcctgaatagctgttgttacaggtgttccccaccacacctggctaatttttgtatttttagtagagacggggtttcaccatgttggccaggctggtctcgaactcctgacctcaagtgatccgcccacctcgacctcccaaagtgtgctggaattacaggcatgagccaccgtgcagagccacaaaaatattttaagtagaacatcaaaagcatgatccataaaataacaaatagatgaattggacttcattaagattaaaacttctgtttttcaaaagacactgttataagaatgaaaagatgagccacggagtgggagaaaatatttatacatcatataaaagatttgtrtgcagaatatataaataactctcaaaagtcaatagtaagaaaacctttttttttttgaatgtgcgaaagatttgaactgactttttgccaaggaagagatacagatagcagtaagcatattagtcattaaaataatgcaaattaaaactataatgggataccactattagtagtatgtattagaattactgaaattgaagatcgacaataccaagtgttggtgaggatgtggaggaactagacgtctcttacactgctgatgagaatgtaaaatggcagaagcactttggaaaataatctgacagtttctgaaaaagttaaatgtatacctagtgcatgatccagccattccacttctatgtatttatcttaaaaaaaagagaaagaaattcgcataaacttgtaaacacgtatttagtttgtagcagcttcatctgtaatagccaaaagcttgaaacaacccaaatgtccctcagcaggtgaatgtgtaaactgtggtatgaactacgcaatagaataccatccagtaaaataaaggagggaactattaatgtacattacaagtagatgaatctctttataactatgccaaatgaaagaagctatatttacacatacacacattcacatacaccccacatgctgaattattacattcatacaaaattctagaggatgcaaactaatgtatagttatagaaaggagattggggtttcctggcgatgggtgatataaaaagggattggagaaatggattaaaagcacaaggaaatttttgggggtgctgggtgtgttaattatattcattgtggtgatggcttcatggctatatacatatgtcaaaatgtgtctaattttagactttaaaaagcgcattttattctatattagtatttcagggatcccaagacaaccctgtttggtggtttactaggacctgtagcactcagcatatagtcgttcttagggctaagacttattacactgacgtagaaggatacacaggtggatcagtaaggggaaatgacatcaggcagggtccagaggaatccatgtgtgggttttctgtgttccctccctccctctgagatcacacacagcataccacctctccagtagtgaaaatgtagtcacaggcgtacaatgattatacccagggaaacccacttaagaytcaagagttcagggtttttgttcagggcttgtcacataggcactcttgcccaccaatatttcatattcctgaaaggaaagcagttgttcagtgccccagacagataaaataaccttataagggtaggaaatgtttcaaaagctgtgttcccggacactagccaagggcaagccttgcaagcagacctttctaaagataaggctttagataaagtctcaggcttgttaacacttttctgcagtcacttatacctcagcttgttaaaaaaaaaaaaagttgtaaaagttagtgtgagttagcacaagacagttgcagttcatttattgaaaaaatgataagagattataaaaaatagtaactttagatttgaggcagaccaatgcagtgagaacctcattacctggaatgcttcatacccttaaatcccctctttggaattagccaggagtgttggtgggtggctgtaatcgagctactcaggaggctgaggcaggagaattacttgaacccgggaggcagagattgcagtgagccaagatcacaccactgcactccagcctgggcaacaragtgagactctgactccaaaaaaaaaaaaaaaaaaaaaaaaaaatcccctttttggaacaaggtaggataataataagtaaaaccaggaagcttggctaatgggagcttctaattatttttactctttaatattgkgactttcatttctattgtatttgaaaatctttccaaggtatatcatttttttcctttcataaaaaattccttggttgatgttcattatttaaccactggttaactgattatgacccagttcagttctatagcaaataaaagataaagcactgctgttgaaattataattacctcaacaacaagaccacctcatgcagttgtgcaggttatacctcgtccaaggcacacccagctgtgagggtgcgtggagcttaagtccagcttgtactttgccaagctatgggctccagcatggggtgtgtctgcccgagaaaggggcacctttttctagtttatgctaagatgccttttgagctgttcagcatgagccctggaaaaaggtggtggtagcgattttctcctacagtgctgcctaatatcagcaagctttcttgtgggcatctctttccccttaaagaaatccagctagtaactttcagttgagcgtcatgtttaaccaggattccactgtgtgtaacaaggacaagcgattccaacggtctctagtttggcccaattgcccttaaaaggcaggcaaatgtttagggtatgtgtttctttttatcactctggaagaagccaggttcaggtctgtatctggatcccattattaatgtccccagccaagaattctgtgtatgtatagcaatagaaaagtcagagaaaggacgctcctgtgacttctctgaagtttttgttcttcctgagtaatgaagtttcctaaaggggaattaaactttctcacctcggaagatagaagtattgtttaaagattcaactttgaaacaaataggaaaatatctgatagttgcaacttagcttcaaatcagcgatgtccagatattgacaaccattttatttctcctaaaccttgagccctagcccaatttatgaccgagtagagatcatggcacagcagccagcctaacagatgggggccatactctagcagcagaaggattctgttttgaaaccttcagcttttgaaatcttacaccactaccagccctacttcttctacatagatcacattcatttcctccctctttttcctaaggaaacttaaaacacatgtcttttccctttttatagatgcgaaccacccgcaaggtctccgtctggcctgtgggcctggttggtgggcggcgctacgaacgtccgctggtggaaaacggcaaagttgttggctggtacaccggctggagagcagacaggccttttgccatcgacatggcaggtgagcagtgtgggtgatgacatttgttcctgctggactgttcttatgctcttgtttataacgatgcactagatgaaggaagctttaaaagacaaatttsgataaaaccctacatcatatcatattcaggagatgaaatatttaaaccttcaaaataggctctttggttagatcaagtggaaattgatttggagggtgattagaaaatgccctttctgttccattttgtcccctgtctgtgcctttatcccacaagcgtctacatggcagctactgggttggccactggggattcggtggtgagagctagacctggctcctgccttccaggggtctgttagctggaaccttttgactcccttttctagaagactgatatattaaaatatatcatgtttattgataaatttaacaatgatataaaaattgacaagtcattttaatgcttattgataggtttagtgctttattgatatatttaatactaaaatataaacttagatttctggtatttcaagaatttattgagtataactgtcttaaagtttttattccctgaacaaccaactgaattgaattagccctgcagtaggaccacacgttctaaaatgctactttatcataaaacaactcattttctatgggttatagaaaatgatgcctgtgataactgtggaaggatggagtttgaaacatgaggctcagaggcaaaaaaaaaaaaaattcggtgacatctatactcttaaaaatgaaggcagaaaggcttcaaaattgatctcatcaatcttgagctctgaagcacagctctgtcgggctgccagcctgtgcttgccccatcttctgtgcatatttcccagccgtagtcaagatctccgcgttcagaattctgatgggatggaggctgtcttctgaactggattcatcacttttattctgacaatactataaatctgagggagccagaggacgaagaataccaggagtcatctgaggggcacagcgctcatggacagctgtgtggtgggtcttgtcacatggcatcgtgggagaggacaaataggagatttttactcaacatttaacacacatctccacagcaccagccctcagccaggccatgtctcaggcccctgacctctccatccctctgttactccagctgtttgctttggtcttcagttcttgcagctccagaactgagctggcatctcagtctaggtctccacctggaggcagaaggagaggcagctgagccatcttggacggtcctgaggaccctcgaaagaggcctgccctcgacccgctcagagtgcatggccctgaaaacatggggcatagtgtatcttttgaaaatcgggcttcttgctgaccagaagtgtaccttagagcagaaaatttagacaacattagrgaaagtccttctgcttctctgggatgtagttttcttgtgtaaagtgaggcagctgccggagatgaccaccagggccctccagtgcagccctcctttcctggcctcccaccttggaactctcaagtaagagcccaagcttgggcttctaagtgaggattgtgactgctcaagcagccgcagacagacttttgcttcagattttcccagagccttgtttcaacacggacttcccagacatatctccttmacaygtgggatgtctgcccatttccttgcatggatcatgcaaggtgagggcaacttgggtaactcttcctggattttaatctaggaactttatgtagatgatcasgtatcaaatagacttgttgaatatttgcattggttcccctagaatttgggtcacattgatatttctaaaattaaagatgtatgtgtttgtgcattagggctggcctatctaggactgccaaattctgtgggaattcttttttccatgacaagaccaatgtttggatttttctaagcatttcagtatattttcaaagcatattaaaaacacccatcataataagatatgaattatttccttgctctgtattcattatcatggktttaaaataggaataaagtgtctctaaggagacaacttttgtcacactaaataatttttttcacttcacacatgaacttgctttgcatcttagctttcagtaaattattgatatttttggaagtctttaagtgtaagtaatttggtcgataggatagttattctgtttttgaggcagtttgttctaattctaacttaaaaatttgtggctttgtttagattccacatacaattcatttattctctgggaagagggaaaagaccttttaggccttcatgttcaattggtgcttcccrcctcatttccaagttacatgtacacacacacacacacacacacacacacacacacacaatctgagctctgaggagctctactttgaaaatgctctgtgatagtcaagtgagagcaccatattggagcctgggtctgtcttgcatttgcaaagcggattaagagcccaaatggaacatttgtgggtttgagcacattcagtagaagcccctcagagcctgtcctgtttgtatctctgtgaggtcatcacatagcccatcactggaaactcatttgagtatcaaacattgaaactgcgatgtttcatgtcattctagtagttcttacactgtcattttattgccatgttgaacttgcctgatactgaaattttgctctcaggtgacatgaaacattgttcttgaaataatcttatgtttacaaccataatggcagaattaagattatttctgttccattggaggatattttttaaaataatgattactacttaaaaaaattaatatgcctgcccacaagatggaaagaaaacactggaggcagccccactggtggtgtgcagttggcttcaaagctgaccagtagccayatagctctgccaagccagtgaggccctggggggtttctactgttctgtgcctcagrattcaattcttacacctcaggaatctgaggattggctaaaagtgaggaagtccaccaaaggttttagctctgttttgaagggaggcagttaatttcaagtgacagactcacttcagccacttccagggaggtgtcagtaagaacgactgcttgaaagaactgagcttaaatcaatcttcaccctcaccaggaggtgtagatttgttcaagttgagaacttaaaacagatatttattaggaattttcaacattggcatgtgccttattattaattctaggatgtggcccgtgggacacggtgctccattaatgacagtatatgcagttcccagttgagttgctggcacacagtaggtactttattctgctaaaaacacaactaggtgtactgcaattagattctgacaccacctggagttggtgcagaccccacaggttagagggcacagtctccaacaagactgcccttatttcacatgccccccacgcgctggagagtcccaggccacctgcacttctgatcaactgactrcactggatgtttcccacaatctcctcaggtttgctaatttgctagaatgactcacagaactcaggagagtgctgtaattatacaaattatcattgtaatcagtgttataaagaatacaagtcaggaccagccaaatgaagtgacacacaggccagcagagccaggtggaaggagcaggctgggagcatacaggtcttctgtgccttttcctcatacaggtgaagtctaggaaagcttagttttctggtctggagtcctgtggaccagggtgtgtcgaagccctggggatggatgtgctcccacagggagactctgtggcagcctcggattgcatcctgggggcaggcatttaaagtgactgcagggggggagccagggaaagagacaaggcccagcaagagggtgttagggtggacagtggcgaggtcactggagagaaggggtggaygaatgatgaattccgttattggatgtgggaagaggaggacccttggtgagtatgggagaaagaccgctggaagcagaatggtctgagcaaagttaggtttctggacgggcatggtagctaacacctataatctcggcactttgggaggctgaggcaggtgaatcacctgaggtcaggagttcaagaccagcctggccaacatggtgaaaccccgtctctactacaaatacaaaaattagctgggcgtggtggcaaatgcctataatcccagctactcaggaggctgagacatgagaatcacttgaaccaggaggtggaggttgcagtgagccgagattgcacctctgcactccagcctgggagacacagggagactgtttcaaaaaaaaaaaaaaaattaggtttctaatggagcagagggggagagatttgatctgggaaaggcttggggaggttctgtcttggctggacagggatttgaaaggatgttgtgatgatgagtggccaggaggtatgggttaggaagaggaagggtgcaatggccactgaggtcccctccaactcgagggttgtgtgattttgacaagttctgattctaaggactgaggttgtgtaaggcggtgcacctggttatacttgtcttctgtcggcagccaactcctcctcgcctacggcctatcaccagctttccagctggtggtagtttctattcaatggaggcttaaaagccctgacttttgtggcgagtgggtggacagtgggggtggggagcatgactaggaggcaggagggccaggagacaactcttaagaaatgcggcagcaaatgagtaggaaagacagatggtggcagtttcaaggggtataacagctttttcctctttctttaatgatggagggggagaaattgaagttttaagaagtgataagtgttgaaagtcccaaaggagaggaaatgaggggagatcaagaccttagatggacaggttcacctagatagagtcacctctgactcccagaaaaaaggtgagataagtaaggaagccaagggctgggaaggtggaggggccagttgttggaattgaccgtccgccaaatgttaatagagggagaagtgacatttggctgaattccacacacactgaatgtagcagcccctcgcctcaaggagttttgtatctagcagagagagaatgtctacaagagcatggcagatacatcgtggggtcgaaaatgagtacaagtggaatgattgggggttacatttaaagagaaaaccacagccactgggggagtttcgggaaaggtcttgggaaraggtgacatctgagaggcaccttccrtgctaggcccaggccagggtagggagggatcatgggcagggtgtgtttttggaacaagttatcccagggtatgtgtagctcttgggaagggcaagctggggtcagatagtgaggactgagtgctaagatgagaagtttttcttcatttctgtggacattggagagtctgacatttttyaagtaggggactgatgtgattagaaatacagtttgagaaccacatgttggcagtgtgggatgaatgggggaggagggctgggcctggaggctcaggcagccatctgggtaatgagccsgtagcgggctgggaggtgagaggaggtcttaaataccacagctattggggacttataaaattttaacagccttttcagattatactctaaatcagcagacacttagatctttttaacacctttttctgttgtatggtatggtgataaatgatgtattaaatttaagtttggttaattttaattggtgtaatttgtattatcctttgagtcgtaatttatgtgtagaaaatacagtgatgttgggtaattaaaacattcttttaaccagaacacctattttgtgtaaaataggagtctgcatattaggaaaaaaaaaaaaaatcacatcacctgactgaagttttcaagctcaggattcactgtgggtgtgttgtcccagtggagggtgtcgaggctgaaagtgaggaagacagtgatcacrcctggctggrcctcctgtatccatacctgccctctcccgtgtccactccacctcgaagcaggaggaatctttcaggaatgcaaaccagattcttggcagtcccttgctcatagctcttcaggggctactcatgctcttggaataaacaattccttgtcactggcacctgccaggccctgcccggcccacccctgcccaccttactattcttgttcccctctactcaatctttgcgggcagagatcacttcctccagcacattctacccttccctttggggcctgcactgatgcccctgcctggaaatgctccttcctcgttcagccctactcatccttcaaatctcagcttaaaggctgccttcttggggaaggttttgctgatgcttcaattaagatagctcctcccgtgttataatgtgctgttctctcagcctsccatacctctgcaccttgtcacagtggttgtacatctctcattataattgttgaggctcygccaccccgactcccagaatgcatccttcctgtaggcagaagccggactatcctgccctccactmcttgcccaatcccagccccaggtttcccctagccccagcctgtgagtggggctgagtgacggcactatcccagagcagctgtccccgctacaagtttaccaggcaaacctttaaaaaattattataaatgatgaccatgaaactggagggggtcgagggatcactctgggcaggttgctgaagsctgctttctgtgggctctctgcagggacrtgggaatgacagttattctgggtctccttcatctcaatgtttgtcaacaaggaattttgcctgggttaatttatttggcagaccttttctcagtagataatgctgtgatcagcttcagcccagcccggatcagatgatcatcaaagccaaatgagcagtcaaaattaatgacgttttgctttgcttcatgaatataaatactgcaagaaaatggagggaattgtcttcctgccactttggagtcattcgtgatttaagtgtgctgttttccatgcatgaatgttttctatgagaactataaagttactgaatsttctcagtagagtgacttgatgtgtcatgtggtaccttttagtgsaggatctarggaccagcttgggactttgtccttgggttggtacagtgtgattgtcaccgggagaggactgcagctgccagggggtggtaattctgtcccaacaacttatagaaccacagggacaggtggcagagtgttggggcaataggcagcctgccactcagtttttaatctatttctagaacatggtgcagtctagagacttgcagggatttgatgcccacagtactgtgtctggtcctgtctgcatgtgctgtggccagggctgtgctgggtagaggtgggcgtgtggggcaaggagcacatgtgcatctgtgtgctcatactcagggtgcttgctctggagcagctggtagtggggtcaggtggggtggacgtggagagggagggctctgcagaggcctttcagggctgaaggggaagtggggagasgggtttccaggcctctgtccacctcaattctagcagctctgcatttacatattggagatcccctcaagatttcaatggaataaaacattcattccaggactaaaaattttgaaaacctgaagttttcctttctatcrggatgtccagcagactcaataattatatattgtttgcttagcatttaccaagcatcaggcatttggaagcattctgtgttctttcttcatgaatcctyacttagctgtgcaagggatatgctagttttattatccccacttacatataaggagcccgaggcctaggtatgctaagtgagttgtctgggattcagagtcaggycagtgtgtctacagagatggtctccaactcacccacctacagccaagtcactgagttcttggtctctgagcctgcagaacagtttcttggtttcttcatctgcagaacagggaaaatgaaatttttcacaaaatcagacatcacgtgcaaagcagccaggagtagaacattgtagacacttggtgaatgtcactcttaaccaagaaacaagactgtgcctttgggttcagctggctcacacatttattttgatgaattaggtcagtgttttgtttsattatcacagtggtgaggtccatgcaggtagctgtagggtggaagaatcactcatcctygggtcctgctctgacacmtacaggctgtgcagcctgaagatctaggggaatatctgtttcttcctaatacctgtagattagggatcattgcttcttcctaatacctgtagattagggatcattgcaccagctttctgggttgtgttgaggttgaagtaaaacgaatacatacagaagttcctgctgttctgtgaatatttgaatctgcacccacttgtagctttgtgagatcactcttaacggtagtatttaagaacatttgaactcygctgtgggctcatgatgaacttcatttctcttctggcgggtggacctgtgctcattatcattcaatgaattggctcagcatgcaggatggcatgctgagataaacgctagcccttactttagattaaatacccccaaaagagagtgatcaacaggagaaaatcgaagccraaaaagatcattaaagagttgtttaggagcagatacgtgttcattgttaaaatttcccagctgaaaatctaaacamacagcacttgagctttcagaagaaaatgccatttgtaacattgagatttgcaaggcatttggtgccatgtgagtgccgcttgcccctgtaggtgagtctatgtagaccacgagacaagtattcaatatgcaaattcctgatggcacatagggaaggatttaaaagaatgattctcatgctttctaatcaagtcacaagggggcaaatgtcctttttcaccacctcgactttcctaagagtccctaggagagcatctgtaggtaatagttttcatctagaatctgttaaakaggtattatttattttactcatrtaaatagttaggattaagggttgttgccctgcactgctaacgtgggggccggggtgcagaccacttctctctttggcatgcaggttgtttgctgtgactactacacatttttctgcactggcttcagaagttaagccttgcaggcattcttcctgggctccctgagcagctgtaatcaccctgaccccaaacactctgcacatcagttcacctcaattttaaatccctcaggccaaccgctgtggtcagtcggcattgccctaagctgatgggcctgattaaaccaagagtggcacacactgccctccagcctaggatatgcaatgtcacttttcttctcacgtttgcctagctaatttccagttactcttccagactcattgatgaggcaggaatcgctttttctgggaagtttttcctgattttccatcacacgtggatgcccctttctaccttttcccctagaatccttggcttatgcagttatgaatatttccacaaggtggcgctcatgtcagtgtcctccctgcccctggccgccttgctagcccsggagtacactaggagggcgctcgggtctgcctgcatctccaggccgggcacagtctctgatggtaatagcttgaacaaatgtttgctgaattcatgaattttaacatgttttccttttctagtgtaaggattatcaaaattaagatttaaagcttctcgcttctgagacaacattgccattatttaatggtggaggtgtaaagggggatgccgagctgtatactccagagctctctgaggagggtctaattcagcgggtctccccatggcttcgcatcaaaatggcaaggggctttgaaaaaacacccacacttgagctccacctaggagcaaagagaccatatagtctctgagggtgaggcctggtatttgtgtggttgcgggttttttttgtttttttttttttttttgagtcttgaggtgatcccgaagtgcacccaggagtaagagaggcgggcgaaagtgatcagaagcgactcctatttccttcctgtggctcgttatcgtctctcagtggtcacagtcctttcccaggccaccccctgtgtccatctcaggtgggataacctcatgacagagtttgggaacgctcaatagagtcacttccatagaaaatacgtcttccattgctcaagcaagaagagaatttgagcataggacaggaatattttaatcataataactgaaaaacaccagcaacaatataaacaaaaagattgcctgtattcattgggaatgcaagttttatctgtgttttgattgtggtgaaatatacgtaacataaaatttaccattttaaccattttgaagtggacagttcagtggtattcaattcattcacattgttgtgcaaccataaccactgtccaactccacaccttttccatcactgaaccaaaattctatgctcactaaacaataactcctgacttgcccctcccctcagcccctggttaccacaattctactttctgtctcgattaattagactattctaggtacctcatataagtggaatcatatttgtccctttttttttttttttgcttattgagcataatatctttaaggttcattcatattatattatgtatcagaatttcattcctttttaaggctactaatattccattgttacgtatagtccacatttcgtttatccatgcatacagccatggacgtttgggttgtttccaccttttggctactgtgaataatgttgctataaacattggtgcacagatatctgttcgagtccctgctttagattcttttggatgtccaaagtagaactgttggatcacaggtaattttttgtttgaattttttgaagaatcaccatactattttctacagcagctgcatcattttacactctccacagcaatgcaggaaggttccagattctccatatcctcactaatacttatttgcttctgttttgttgtattagtttttttaataatagccacctaatggggatgaagtggtatctcattctggttttgatttgcacttcatgtgcttcgtggccatttgtacttccttcttagagaaatgtctattcaagtcctttatacatttctataaaatgtttatgtatttatttgacttcaccaacagaaatggattttctcacagttctggaggctggaggtccaaggtcagggtgtcagcatgtgagttcccttgaggcctctccttgctcacagatggcctttcctctgcggcatgcattctccactctctcctctttttatatcagtcatattggactttgcccatttttgaattgagttgtttggtttattcttgctgagctgtagaaattctttatattttgggtattaatcctttatcagatatgctatttacaaatatttttcccattctatgggttacctttcccactctgttaatactgttctttaatgcactaatgctttagttttggaagaagtctagtttatctatttgatttatttatttttattttttattttttgagatgtagtctcgctctgtcccccaggctggagtgcagtggcatgatctcggctcactgcaagctctacctcccgggttcacacttttctcctgcctcagcctcctgagtagctgggactacaggcacccgccaccatgcccagctaattttttgtatttttagtagagacggggtttcaccatgttagccagtatggtctggatctcctgacctcgtgatctgcccgccttaacctcccaaagtgctgggattacaggtgtgagccaccrcacccagcgtacctatttgatcttttgtcgtctgtgcttttggtgtcatatctaagaagtcactgctgaatccaatctcatgaagctttcctcgttgtcttccaagagttttatagtttgagttctttagctttagtctgctgttagagaaagaataacaaaccttcatttatccagaatggttgagggttgggggcagagtatggtcttttttataattaactgtaataaattttaccatttctacattcctccatccattaaaaagatcaggattagaaagtaggaaaatatctaaaaccatgctggaaaacagaaaaggacatgtacaatgaagcttctgggagaaatgtgaggctaagtttggatggacagacagacagaggagggggatcatatgagaagtaagaggatggtgtcctcatgggagcccctggacacccctattctcagagtgcagagatccagtgggctgaagggggccgtgcctcagacacatgccatcaagcccctacacagcttcctcgcatggcagagaatgcccccacatcaggtgggggttgtgtggtaagctcctggttctgcctgacttctgggcagtttcctcccattaacatggagggaaaggctctatcacagcccactggtgaagccscctctgaagtgttgagtttccctgagtaactccctggtttttctgtggaaaccgctcaaagtggccacaggtgtacctaaaataaagcctctcacaattgctaacaaagaccaatacaagccatcaatgctgttcagccttgacttctgtttgcaaatatgagtagataattaaaaaaagtaaaccaagacacaggagttcccactgaaagagtataggaatcaagagagggcttttaaaatttctagagttcattctcagattttaaaagatgtggcatcataaaacaagagccagcagctgtgaggaaagagtcattggagagcaaggattcctgtaaataaaaggcatgactgctggaataacctcatgtgagagggtgacagcatcgaggctctaagtgtcagtgatactgttagggttgcaatgcagaggagtggatcccaaagccctcctggaagaatcctccaggaattcttccaaaataggagcaaaagtacaaagaaatagaaatgtcagtggaaggagacttataaatccagcatgttcagtaagagtttcagaattagaaaataactatatatgaaatatcaagaaagaaacagggctggttgtggtggctcacatctgtaatcccagcactttggaaggcgaaggcaggagaatcgtttgaggccaggagtttgagaccaccagcctggccaacatggtaaaaccccatctctactaaaaatataaaaattggctgggcatggtggtgcacgcctgtgatcccagttactcgggaggctgaggcaggaggattgtttgaacccgggaggcagaggttacagtgagctgagatcatcccactgcactccagcctgggtgacagagcaagactcacagagcaagactctgtttcaaaaaaaaaaaaaaattagccagctgtggtggtgcacgctgtagtcctagctacttgggaggctcagccagaaggatcacttgagcccaggggattcgaggctatagtcatgccactgcactccagcctgggtgacagagtgagactctgtctctaaaaatcagaaagaaacaggatacaagttcctataatacttgagttttgagagtgattccattgccaggtttgaatttgggctctgctacttcctcagagtaagcttttaagcaagttacttagcctctctgtgcctccatttcttcatttgtaaattatggtagtaatagtatctacctagtggggtcactgtgaggattaagcaggttaatacagacagagcacctaggacaaggcctggttcactgtgaatgtttcctaaaatgtagctgctgttaagccaaccgtcactgccaccactactcttagttcttagaatgtacaggtatgcggctgccctgtgaaagcttcacagtcggtccggtttaccactccagtctctctctctacctcctctgccgcattgccacctccacccccacccccacccccacgccccgtcatctcttacctggaccagcagtaacctcctaactagctccacagcttcatttcttatccccaataatatgctccctgacccgttaggctccaggttaaaacatttctgcagctccccttgcacttcgtttctccatggcctcccaggccctgcatggttgggcatccccacccccgagcctcgctcaagttattttccttgtgttctctgtgcactcagcttcagtggcttgctgtcccatctcacaatcccgccatcacgtgtayttgtctctgcctggaaggctctttcctcaacccacctgcctctcccacaccatccttcagagtccagcttaatcatccttggtccaccctggagggtcagatttcttcacatagcacccgcacccttccttcatagcactcaccaccgtgtgtgcacctgcactattagccaacattccacctccctgacaagcctgcacctgggctataatgactctaagatgcagatcatgactgattttgcttaccaccttctccccagtccctggcagtttgcctggtatgtatgtttttgttgaatgaatgaatgaatgaatgaatgaatcctaagtttagaacaactgtgccaggatttaataataaaacaatcccaagggtattcacagggggtcagggggaaaactgcttctctatgaaggagggaaaaatcagactagcatcaggtttttttctgtaacactgaatgatacagaataatggagaaaggtgtttagagttctgaagaaaagaaatggatcctaggattttttgtaccccgtgaaatcattatgtctgtgtgagggcaaaagagacatttcaaatatttttctcaaaaaacaaacaacaacaacaacaaaaacaaagtcacttaaggaaagcgctttagccaaagtgaattagaataagaaactaaaaaataggaagattgctgtaccagataaartagtaagcaacaaaagtggcaattttaacaattaaaagtggatagtaactaacatgactgtgaagtttaaagctgtttgttggaatctggaaataggagaagcaaagtgaaaatgaagttttcaaataaaaacgttggtatatttsaatgcctgctggtgacggagaggataggaaatgggagaataggtgcccactagcagatgtagtctcattcaaaaaggtaagggggagggggggcagagagaggctttaattcatgatgataagagaaatatcagttccttaaaagctccttaaacagttaaaaatattttaaataaggaattttaaaggtaaccacagtagaatacatataaaacaaaaccttttcaacaattagaggaagaagagaaaccaaaatgaattcaaaaagaagaaggaaaaaaagcaaaaaaaaaaaagtatgtaatgcacctaagataaaaccaaacatgataaccacactaagtgtgaaaaaaattaaattgctctaaataaaacacagcagcaaagctatatctcatataaaagacatgtaaaaatgtgatggagatggacaataaagagataaactatagtatcctaaggaaggacagacaacaaaagagcaggagtgttcacattcgtgttgaacaaggcagaagtcaaggacaaaaatattgaatgagaaggagaggaacattttgtattgacggaaactatgtatactacaaaagtacagcattcatcagccattgtgtatgagttatcaatgagtccaaaaactaaaggcagacatagataaaaatagaaaatttgacaaaaccataatcatagtagacatgtttaacacacttatctaaatctgacagatttaagtagacaaaaggctgtagaaaatggaatatataaaaaacttgatctaataattatatataaaacactgtactcaatagacacagaatatacctttatttcaagtgttcatgaaacatttataaaaattgaaactgtatcaggccataaaaccttaaaaaagtgcttgtataggctcaaagcactacactagaaactaacaaataataaattacataataatgataattaaaaagtggagttagatctgttgacaagtagatgaccagaggtaaactgacagcagggctggagaagcatggatggtttgatccttgctcagaagcctggtccctggccagtctctccctgtgcttccccatcagcatttgcagggaggaacacaggattacaaaggtcatggctggcttatggaaacacaagctgaaattgaatctcaggtatctatgcctttgtaccttaggacagtgtgttttacccacagttctttttaaagtggggaagcgtggacagtcttacaggcaggtgccttgagcagctccacccccgccgccaccacattcatgtcagtcttggcctgaacatatcttcaggctacaccaaggttcaaagccaatgtaaggtaagatttggctacaggattttgcatgcagaaaccatcagcgctgttagaagcccctttgaaggagtgagaaggagaaaaacctgtacagaggagagcgtacaggttactctaggtacttaagaccaggacttgatggtaagagagcctacaggaaatgtccaggaagaacccatagctctgcagaagaggcagagggtcgggggaaaactgcctggccatggagtgagagttggaccaccccaatcctgctccttctcttttgtgtcttgggtgaaagagtgaaatgccttccaggttctgatgtaagctccttctttgtcccagtgtccaggcctgcactggtgaccttctccagcactctctgtacctgtgctgaacacccccggtggggcccatctgtctgctcttacctgaaccatctagtgcagcagacactttgctggtctctctacctcaggcagttaccatactgctgccagagaaattttcctaaaattgacttttgattacaatctggagccaaggttgcctgccacagagtagggtgcagagtcctgggcacaagcaacttgacagccttgtcacccatcattgctgctccagcctaagacttggcctcacaggtctcccttcctctacatggatgcttcaaagtccctctcagatttcagtgtctccaaagcccttactcattctagtcagatagcatttgcttctccaactcctgtgctcccaaagctctctacttacaccttttatagcatctgtggcacagctgtgcccatatctgttcttctaattaaactaggagttgccagagggcagagaccacattcagtattgtgttaccaatactgaaaaccagcaatgggcccctaaagagcttctgaatgagtgaataatatcaaaaggaagatgaaaaatgaaagataacatcctttagattggtgaataagaatgctcttttttaatgattatgcttaacaaagaatgcttactatgtttccaggtaaatatttgtttacatatattcatttaagatttacaataaccgtataagatgatagctatctgcattttacatttgtgtaaaccaaggcacagaacagtgaaagtaccttcctgagtcactttaatagtagatggcagagtaaggatttgaattcaagccctccaagttacaagcctttactcaactaccgtccttccccgccacactatttcattaaaataggtctttaggaaactctgaagatttccagtcagaaaccaacatagcttccatgtgaaactaggaggtgatgtaatagcttcattagtgaatccctgaagagctaccatttaaaaaattatttcactaggattggggaataagtaccttcttcaccatgctctgctatattttctgggttggactagagtggcttagtttgaccaattcagtagtaccatggcctcttacccaggccatgtcaagcatgttgactctgccatgcccagcatatacaagtaaactctgaagggtttatttcccatcagagtctttttggttctaaacttcagtgttagttgtgcccactaaaaaataattcatggatattttccgtattcagttaattaaacccctttatattatgtttggttattaggatcagattttccatccttgctcagcatcctgattgtttccttagaagattcagttttctatgatggttttttcagagtagagatttaaatgaattgtttatagattaaataaagaacacttcttggaaatgcagagtgtttcacttttttccatggaaaataatgactgctaaataccttttgaggaatttttaaaattagacttttacttaagtttcaccttgaagcaattataaagtttcagtcagtagtcagcagattaacagacctgtttaacaaccaaggcatgctttttcattcttcttccacaccagaagaaaataattctaaattataattggaagtaaatgcgggaagctatggttctgtttactcagtaggaaagggtagatttggaagaaaatctatcatggctgtgaaagaacacttcatgacatatgagcattcagtcttagagccatgaaaattataaaggaacacttgcaggaaacagtggcaatttgggatagtaaataagcaaaggaaacattcctttatatagccttcttttctgctttctatatttgatttaaatctagtggaaatgattcctaaatcaattttactaacacatttgtttctcacttggatagttttgagatgccagggctggaaagtacagggccaggggaaaaaaaagtagttaagtagcagttttctgttttcaatcatcaaaccctacattacagtattttgtttttcttctatacttacctataatgtggtactgggatttggggttgcaaaaagagtaatgtcattgggaatgacagagtaaggacttctgaatattctcatccataaaaacagtgagaacactggcaaaatttgtcaaagtcaacttcttaagaactatggaaattagctaaaagtatgcaagaatctggggagttttgtttttttttttwwaaaaaaggctaaatcttggtaagagcagtattgtagtatatcaatttgccctatttccatccccttctctccatttcctccatggtagctttgaaaaccaacagccctgtaattgtggtgaaaaccagcagcatagcagttactagaagggcagaacagggttggaactcattcagagctccattttaagagaattgtcattatgtgatctgtccagcaattccctagaaaaccctgttcacaaggcttgtctttatttgacctcattcactagagcaaacaggcttttccctgggggcgtttgtcaaaaacagcttgtggtgattgtttaccatcacagctccctgaggcaataacagttgtggcaaacaagctaagcaaaaaacttcattccgtaggggcatttgaaaagctctgacatatttctggaaggccttgtggatgtgtaggactatatgcatgcccagggctatgtgcttgttcaagaaaatccttacaaagtcctcagtcttccccctcttagtactgtgagcccctgtgcaatcaagaagtgaaaactaaagcagttgtacattgcctggctgagtgttgaaagcatgcccaaatggacacagagcatcttggcaaagactgagagactctggttccaggcatttaaggaaatctgtgtccaatatttagttgacctcttaagctaactgaacacagacttcattgcccacactcagcaaagaacacagactttacaaagttagttcaaggaagtcactaaaacgataatgacaacaataaaagaacaactaaccttagagmatctgatttccagagttgtcacattatattatttcaaatgttcagttttcagcaaaagagtacaagacatgcaaataaacaagaaagcatraccaatacacaaaaaagaaagcagttgatagaaactgtccctgaaaatgtctggacattatatttggtaggtaaaaactttaaatcagatattttaaatatatggagtccactaaagataaccatgtctaaatagctaaagaaaaatgggagaatgatgtctcacaaatagagatcaataaagagatagaaattatatatttttwaaaaagaaccaaatagaaatgctggagttgaaatgtacactaataaaaacaaaaaattcaatagaggggctcaaagcagtttcagcaggcagaagaattagtgaatttgaaacatagataaattgatatgatccagtttaaggaacagaaaaaagaatgacgaaaaatgaacaggacctcatagtcttattattcacatatactaatatacatattatgagtcgtagaaaaagagagaaaaagggacaaaaagaatatttgaaaaaaaatgttagaacttcccaaatctgtatgaaaaacattaaacatcgaggaagctcagtggattccaagtaggataaactcagagattcatacctagacacatcataatcagttgaaaaccaaacatgaagagaatcttgagagtaacaaaagaaaactgaatatgattaacaaaggctctttaataagccattgtttattaacaaagactgatttcttatcagaaaccacagaagctagaaggcagtgggatgacagattcaaagtactggaaggaaaaaaagaaagatcaaccaagaattctgtatccagcaaaactatccttcaaaaatgaaggagaaatgaaaatattcccaattaacaaacaccatgaaaattcattgctagcacatgtgccctacaagaaatactcaaaggagtcctttaggcaaaagtgaaaggatgctagacgggaactstaatccacatgaacaaataagaacactagtaaaagtaactacataggtaattttgaaaggcagtataaatgtaatctttatagctcttttctcctgttttgaaaaacagctacataaaccagtcatcagaaatctggtttgaggagcacaaaatgtataaagatataatttttatgacaataatagcmcaaatgaggggcaaagaatggatctgtgtaggggcaaagtttttttatcctgttgaaattaagttggtattaatctgaactaaactgttagaaattgaaatgttaattataatccccatggcaacctctaagaaaataactcaaatgataaatgacaagagaattaaaatcatacactaggaaatatttgtttaataataaagaaggcagtaatagagaaatagaggaataaaataacattagacatgtagaaaacaaacttcaaaaagacaaatgtaaatcaatttattggtaattacattaaacgtaactggataaaaaacccaatcaaaaggcagatggacaggatgtataaaaatgatccaactatatgctgtctacaagacaaacatgttagattcaaagacacaaataaattgaaagcaagagaagagaaaaaagtatatatcatgctaacaggaaccaaaaaaaaaaaaaaaaagaacgggaatgattatatgaacaccagacaaaatagactttaagacgaactgttactagagaccaaaaaaaagttataatgagaaaagggtcactctgtcaagaagatataactataaacatatacgtgacttacagcagagctccaaaatacacaaagtaaaaatgacaaaactgaaggaaaaaataattcatcaataatcattgcaactatcaacatcccactttcaatactagacagaacaactagatagatcaactgggatagaagacttgaaaaacactgtaaatcaattagatgtaacaaacatctatagaacactccacccaacaagaatggaatacgctttcttctcaaaggcacaatggaacattctccaagattatataccatcttaggccataaagcaggacacaatttaaaataactaaaattacacaaagtatggtcttggtttatactggaatraaatcagaaattaataccagaaaggagtttgtgaaattcacaaatatatggaaattatacacacactcctaaaaaaaatcaatttgttaagaaatcacarggaaaattgggaaatattttgaagagaatgaaaatggaaaaacaacatatgaaaacctatgggggtacagccagagtagtgcttagcaggacatttatagcttcacatacctccattaaaaagaagaaagatctcaaatcaataacctaaccttctgccataaaaaaacagaaaaagaagagtaaactcaaaataagcagaaggaagttattagattagagaaaaatacagaatataaaaacaatataagaaaatcmataaaaatgttttttaaaaaccaacaaattgggaaacctttacttagactgtcaagaaaaaggagagaagcctcacattactaaaatcaggaatgaaagcacgaatattaataccaaccttacataaattttatgagaatactttaaaaaattgtattgcaacaaattagataacctatatgaaaatggacaaattattggaatgactattaaaactgtctcaaaaaaatctaaataggcctataacagagagattgaattaataatcaacaaaacttccctcagagaaaagcccattttcagatggctttactggtgacttctaccaaacatttaaagaattaccaattcttcacaaatcctccaaaaaatagaagggaacacttttgaaggaattctaccaagccaatgttaccctgataccaaaaccaaagacatcacgaagaaaaamaaaaaaaaaamaaaaaaacagacagacctatatcccttttgaatacagatgcaaaaatccttaaaaaaaaaatactagtaaagtgaattgagcaacatatagaaaggattatacaccatgagcaggtaagatttatccctggaatataagattatttcaaatataaaagtaaatcaatgtaacacaccatatcaatacaataaagaacaaaagctgcacaattatatcagtagatgcagaaaaagcacctgacaaaattcagcattctttcatgataaaaacactagagagaagatcaataaactaggaataggagggaacttcatttatttgataaagcatatctatgaaaaattcacagctaacatttttaatagttgaatgccgaaagctttttccctaagatcaagaataagacaagatgacccctctacccatttgtatacaccattgcactatagcttataaaaggcatccagattgtaaaggcattagtaaaactatctccatttatcaatgacatgatcttttacatagaaaaatcytaaggaacacacacacataactgtttttttgtttgtttgtttgtttgtttttaagagattttcttgagggtttatttacatggctgtttggacatctctgttgaaaaggaaaactctttttttttcttttttttattattattatactttaagttttagggtacatgtgcacaacgtgcaggtttgttacatatgtatacatgtgccatgctggtgtgctgcacccattaactcgtcatttagcattaggtatatctcctaatgctatccctcccccctccccccaccccacaacagtccctggtgtgtgatgttccccttcctgtgtccatgtgttctcatcgttcaattcccacctatgagtgagaacatgcggtgtttggttctttgtccttgcgatagtttgctgagaatgatggtttccagcttcatccatgtccctacaaaggacatgaactcatcatttttgatggctgcatagtattccatggtgtatatgtgccacattttcttaatccagtctatcgttgttggatatttgggttggttccaagtctttgctattgtgaatagtgccgcaataaacatacgtgtgcatgtgtctttctagcagcatgatttataatcctttgggtatatacccagtaatgggatggctgggtcaaatggtatttctagttctagatccctgaggaatcgccacactgacttccacaatggttttactagtttacagtcccaccaacagtgtaaaagtgttcctatttctccacatcctctccagcacctgttgtttcctgactttttaatgatcaccattctaactggtgtgagatggtatctcattgtggttttgatttgcatttctctgatggccagtgatgaacacacacaactgttaatgctaattaaatgagtttagcaagactgcattgatacaaaatcaatatatgaaaatcaattgtatttatatacactagcaatgaacaatctgaaaattaaactaagaaaatttcattcacaatagtgtcagaaataataaaatgcttagtaataaagtatgacttacacaggaaactataaaatatcactgaaatgaagaactaaataagtggaaagatatgttcatggattagaagacttaatattgttatgggtcagaagacttaatattgctaaaatggcaatattcccccaattaatctacagattcaatgcaatctttatcaaaattctggctgccctttttgtaaaaattgacaaggtatttgtttctaaaattgatatggaaagtgatgaactcagaaagaagttaggggatttatacttcccaatttgaaaacttataaaactacaataatgycatcaccagatggagcgacatgcaccttatagtcccagctactcaggaggctgaggcaggagcatccctcgagcccaggagtttgagaccagcctggacaacataggaagaccctgtctcaacttaaagaaagcaaactacagtaatacagtgtggtactgacataaggatagccatatagattaatgaaatagaactgacagtgtagaaataaatcatttatggtcagttgatttttgccaaaggttctaagacagttcaatgggaaaaaaagtcttctcaaaaattggttcccagagttatgaatatgctaaaaccgcccttaatcataccatataaaaggacaagttttaatatatgtgaattatatctcaataaggaggggtggtgggcaggaaaggtggaaacacacaacattccaaaaggcagtgtatgctttgctgggaagaggtatgaaaggagagttggccggctcagaattagaggaggtcccacacatatctttctttctccagcaagttccatgactgcactgtgtgtatatactttttaatatgaaagttgaaatctctttttcttattgtttaacgtggggggggaaagagaggcttttgaaattacctgatagctattggtaacactaaacatgtgtcaagagcccaatactctaggacaactacccagagtgattattacacagaaaaagctgttagtatctttcttgtggccaaactataaaagtcttgttgccaaaagtcatcgtttagaaactggaactagttcttatttgtaacagccttgctgagattagatgatgtatagttggagaagagagaatgtggcagtgggatgagcctatggaggtgaggctaaattgatacttacacaatagaagaactgagaagcactattgatactgttaactgtggctgaaggaagaagaggaggcttgctgtacttcttcctttccaatatttctgccttttttgtgggggtgggagccttatttaaatggccaggatctccaggactttgttgaataaaagtcaagagcagccatccttgcctcattccaatcttcagggatttaacactcagtctttcaccaattaagtataatgttggcattaggtatttttgtagatgyccttattaagttgagaaagttcacttctagtcttagtttgctgagaggcttttatttcttcttttcattatkactagatgttagattttgtcaaagcattttctccagctattgtgatagtcagatttttttttttagtctgctaatatggtgaattacattgattgattttgaaattttaaaccaacattgcaatctggagataatcctcaagtggtcatgatttattgtctttttattgttgaatttgatttgctaaaattttgagaatttttctgtgatcatgaggattattagtctgtagttttcttgtaatgtttttgtctggttttggtatcagggcaatgctggtcttacaggataacttgagaaagatttcctccttttctattttctagaaaaattcatgtagaattgctgtcatttcttccttaaatgcttggtagaatttaccagtgaagctctctggtcctggagggttgtgtgtatgtgtgtggaagattttaattataaacttaatttatttgatacagggctatttcacattatctatttcttcatgagtgagccttgtagcttgtctttcaaggactttttctattttgatctaagttgtcaaatttactatcataaaaagttgcttataatagccccatattatcattttaaggtttgtagaacctatctctttcatttctgaggctggtaatttatatcttctctttttcctgataagcatgggtagagtttatcaattttattaacttttttttcctaaatgactaggtttttatttcacttatcttctcaattgttttctatttctactttagtcgtttctgctctcatatctattagtatagtcgttttctccatttactttgggcttcatttgctttctttttctaatttataaaggtaggagcttaggttattgaattcagacctttcttatccagtaagtgcttaatgttttctaaaaactagtttcccatctaaacactcctttagatgtatcctacacattttgatatgtcttgttttcattttcattcagttaaccactttatcatttcccttttgatttcttctttggtttgtattttgcttagaattatattgtttagtttccaaatatttgggatattttccaggtatctttgtatttactgatatctattttaattccactgtagtcagaaaacatattttgtacaatttaaattattttaaatgtattgagacagatttatggcccagactatggtctaactatcgtgataatgttccatgtgtactttaaaagattgtattctgctgttgttgggtggagtgttctataaatgtcatttaggtgtagttgaaaatgttatttaagtcttacatatctttcctgagttttcaagtttgtaaatttttcagtcgtcatttcttcaaatttttttccctgtctccctcattcattcacctttgactctgttcctgtgactctgtacggtgtgtgtgtgttggtcttgccttttctgtttcattttggtagtttctrtcattatgtgttcgagtttactcaacttttattctgcagtgtctcctctgctgctaatcccatccaatgtatttttcatctcagacattgtatttttcatcactgaggtgtcttgggcatcaggcattttgaattttatgttgctagatactggatgagagagacatatatgtatacacacaaccatacataaaaacacatatatatgtaatgttatactatattataaatacatatgtattcttgagctttgtactgggacacaactgagttaacytggaaacattttgatcctttccaggcttgcttttgaagtttgttaggcaaaaccatctcagcctctagtttagggctaatcaatttgaccttacaacaggcacgataaccttccaagttctcctccaggtgctccagctgttactaggtagctccactctggctactgagaatgggaactagtcccctccagtaattgattcacctgctccttgccagtggttctgtacctggcctgaggtagttgtgtgagcatttgctcttcatactcagttgaagagttgaggagagctgtctacagatcagcagagttcttccttctctagtactccaccctgcatatcctagttgtcttggcctcctcaaattctcagttgtttcctcaattcaaggggactgcagagctttccgggttcccctccctgtggtgtagcctgaaaacatacttcaggcaggaagctggggcagttgtaggggtcacatttctcttttctcagagakctctgtctcatgtgcctcttttccaatgtctggaaacttttttcaatcattttgtctgccttttygttatttaaaacaagtgaggaaaaaccagtccctattgcaattttgtccagaaatgtaaatagcttgttggacttttaaagtcttacaaattttctactcagtaatcagtaatcatatatggaggtaggccctatccctctgcctgagagggaatagttattcctgagtatccatagggaattggtttcaggactgctactcataccaaaatccatggacgctcaagtccctgatatagtgtttacatataacctaggcagatcctcctgtatactttaaatcatytctagattacttacctaatacaatgcaaatgccatgcaaattgttgttatactatatagctttaaaacttgtattattttgactggctgctgtagctcacgcctgtaatcccagcactttaggaggccgaggggggcagataacttgaagtcaggagttcaagaccagcctggccgacatagtgaaaccccgtctctgctaaaaatacaaaattagccaggcccacgtctgtagtcccagctactcgggaggctgaggcaggagaatcacttgaacccaggaggcagaggttgcagtgagccgagattgtgccactgcactccagcctgggcaacaagagtgaaactctgtccaaaaacaaaaaagccctattatttcttgttgtattgtcatttttttgttttaytttcagatatttttaatctgaggttagttggatctgcagatgcatctgcagatacagagggtgactgtgtatcctccccacctagctctgctgaagaagtcaggaaatcctgccttctcagtgaacaatcatttttatttgcatttttttttttactcagctgaccagggcagaaaatcctactcccatgactttcgtaagcatctccaaagtaaccaacatctttaaagataacgaatctcactaaaaaaggaaagatataatacttgaagtataaatacttggaattacccaagaaaacatcttaggttggaaatcaatggtttaggattccctttactgtgatttcagaggggagaactctttaactctgcccccagcttcacagcgggtcagattccccaaaagtaacccaggggttgacctagttaacatgcagtctctcctgccagctgtgacctgcttcctttcaagagatcactgagcaaaggaaattgcgttagctgattgtggggcatctgaattgtgctcctccacccctttgtattagagaatagaaaaacacttgggtactgtggagagccacaggctaacatgtctccagggtgctggcctttcaggtgcgcaccattctctagtgacaccaggaaaggagaccttgctgcaaaatgatgtatagcttcacaactggctgttaactttacataaattgtagattttgccatgtcattctgtgtgaagcgctggaaggatattcctgtgctaaggaaagcaacaaaagaatctgaatccttcagtggtcgtgatggttaatgtgttaaagtcttaggggaaaatgaaggaaatcagatccaggtggctccatatcatttccagaaatcacctctgcacaatttggatcccatgtttttgagagaatggggaaatacaaccagtatcctgaagccatgtgaagaatgtatcaggagtttcagtatgactgagaagggtaggctctcatctgaatttaaaaaaaaaaaaaaaaaaaaaaggataaagcttatttataagcatgtgggaaaaagcaagaaatcttttaacactaaaatctgatctgacctgttggaaaggacactacgttatcaatttgaacctctggcttttgttgaggtgtctggtggttgtcctagttgtgtctaaggaaggctgtggacttgttaccagagttgctatcacatgtaggtgtcctggctttgctacctggaactttcccaaaccttttacatctgtcaaccagtattctttcagccataaatggtggctggcatcacctgcccctcatgatcacactgacaatagtatttttatttatatattgtagtatcttttgaacagtgctttgcagtcagtggagtctttccatacctcaatttttcatcaaacattgagttgaagtgttacacttctctcgcaaataaagaaatggggaagttagaaaatcaagaaaggttaaatgagttggccagtgtcccaggggcagggacctaggcaaaaacaaaaggcttctaattccaaatccagtattctctgctaaaatgtgccacctccctccctttagggttggtggaggtatcgatactggggctagtcctacagctaatgctttatgattctttgttctgcttcactcagcacctgctgtaccaygttatgtttgtaagtggcttagtgttaacttttctccaaaaggcagcagggtctggaacaggagactggcccagtctggcatctggagaggatggtggttgtggtgttttcacagctcctccattaccacctggtatcatttagtattactttgcaaactgaatcataaatcaactcatttaatgtagagaagggcaaaagttgctgagaaatgttttgtgggttggtgcccggagcttcaactctgggagggtgcctgacttgacagtatcaccttagtcactaaggaaaaagagatccagggcttcagaccttcaaaacaattattacttgctgagatggcaaaaacaattgtagagtgcttcaatggctgagctttaaacagtttgttaaactacagattaaatacgaatgattcttttttctttgagacagggcctcattctgttgcccaggctggagttgcagtggcacagtcatagctcacagcagccacaacctcataggctcaggcaatcctcccacctcagcctcctaagtagctgggactacaggcacgcaccacgtgccacaacacccagctaatttttgtattttttgtagagacagggtctcattatgctgcccaggctggtcttgaactcctgggctcaagagatccttctgccttggcctcccaaagtgctgagattacagatgtgagacactgtgcccagccagtaatgatttttcgtatgaccaaaccattgaagaaaatttacacttatttttggtaaatgaaataccaaaaaaaaactttatcagatgatggcctgatatctcctgcactgatttctgccccacataccctttttagattgaaccaaattagaaatataaaccagatgattaaaaattaggtatgattcattttccagctaatcggctttacttctgttgctccctcttctaaatgcaaaatgaatccaagcagtgctggatttaaggaagcatacataattaatattacagggcaggcaggagagctgggcatgtggtctcataccccacatgtagttaggtaagcatgtatgtttttcagctgcatttatttcttagttattcctagtggcaaatgtggggggttgatgatcactgtgaaacagcagcttataaaattcaccctttattatcaacagactaaacttcctattttgcgtagatgctcctgtgcacgcctttattttacacggaatgtaaaatattgtaatgactgattttcctttgagactgtaatacaggtaatgttcctattcaactttgtaaaccaagacctgacacacagtaggtattttaaaaactgttttgatgtgaccaaaattatacagaaaaaaagagaagtacaccaggattttaaagtctcttttttttttttatttttcacaaaggatttgctgtaagtcttcaagtcattttgtccaatccaaaagctgkatttaagcgtcgtggatcccagccagggatgcaagaatctgactttctcaaacagataacaacagtcgaagaactggaaccgaaagcaaataactgcactaaggtattcattacacttgtgctgcccgacctcgagtgtcaccatgaagagtgcgctacccaagctatttccttccccttcaggttctcgtgtggcacactcggacagagaaggttaatctagccaacgagccaaagtaccacctggacacagtgaaaattgaggtataaattgaagcagcaactggtgcagtttgtccagccagtggatccatatggaagaggatgtttggagtttaggctacagagcattcaggtattgtttgttttacttcagtacagcagcctttcttgtcatctgatggacatctgtttaaatggagcttgtcagttaacataagctaattggatggttggtacaaaatgtatgttttgtcttcatttgttctgcatgttttctctacaacaactaaattggaagatttttttgtacagtgccgatactgcaagataccactcttgagtatatattttttctttttctccaatttgcccttataattggtagacttgaacaggttggtagacttgaacaggtttttaaaacagacaagtattttgtcagctaaacgttcctgatgattcctgactttgcaatactaagtaatttttggaaggttagtggcagtatacatcataggaaataaaaacccacaaatgaaaaggtctatggagtcatgtttaatgtagggaaataacattttgtcaatactaggcaccataaaatgtaaacacaattactgtcataaacctagatataccttcaaggattgaagattgaaagtggctttgttttagttagttaccctgtttgcatatagtgcagaaaaaggtcttcatgttagcactatgtacattaagaagagatccaaattacaagagaggcagataaaatytgaattctttaagcattcattaaacgaagttttggagtaacatccacgtttatcttcctttcactaatcacgttccctgttaagcacatcataacaacagcacagtgaagtgaatgatgaaataagagcattttgatacactagaaaacagtgctcagtgagacatttacattctatttatatgattaaacatttgatcatacagtaccttcctacaggattactggctaattttggggtggggtttatactattagaggtattactaacatgataactacttcccttatatgcaaacattagagctataattttattgagaggaaaactgattttgcaagttgagcagcttctcaaataatgcagtacatgaaatcatgggaaatatgagcaaagctgcccttgacataaaatgatttatcaacctgcttttcaccacatcaaattgaatcagtacagaccaacacggtcaatcagatcattcttaatatgaacaaatgggtaaaaagaaaaaaaatatgcatatgaataaacaggggaactagatgcgtttcagcaaggaatgtcaggtggtagttctggatgaaacttgtattgcagttttcatttccacagttgtgtgctgagagtctgacctgatgagcttccagaccatcctgctgttgtgctggagggctggccaaaacctgcagtaggggttgcactactgatactcatgccagccatctgctgattcatctgtgaaacatataaaaggcttagttcaagaggcttacttcacttttaattcttgtttctttagccacacagttggtcattttttcattaatgtgacaactagtccaagcactggaataaaaacagagtaccatacaaatatttcttaaagcaaatagctactttgttcccttctttatctactttctagatacagtttccccaaagattaaccacaacttacttaaaaaaaaataccaaagcaatcttgggattttaatgagtccgctactctaactaactttcacctacactaggatattgtgctttaactactaaggagtaagaaaattttaggaagtaaaatagtctaaaattatcctataaactttgtatgatagatattattctctattaaaatcttatatacttcctaaatatttttaaagtggtcataaagcatttatttctctcgctgatctaacaacataaacatctaaaatttattttcattgtatgcaataaagcataagattacatgtatttttcttcaagactggagtcaaatatatatatatataagcatcttaaccctgtgattctcttacttccaaaattggtgataagagaaggaaaggcaagatttaccatatagtgagtgggtttaaaacttacactcagagttagactgtgttcttaatttaatacatttgacttgacttatttacagtttcaaagacactaacataaactacatcactaatcaggcataagtgtctgaagaagcagatcacgtcttcatacctactaaaggacattttaaccaccttgtcgttggccagtagattgcactgatggagtgctggagaacagcatcacccttctgcattatctggaagtaagagccagtattaactccttcctggttcatctagcaccttaacctgagctgggtgtgcttcagcatgttgaccatgtgactgacacttagcacatacaattttttagattcccagcgggtagagaccaatgttttacctatattcttgtaaatggtggtagcaaaattaactgtgatatatagtgattgtgctaatgttagaaatcactctagactattccctgaatgctctaaaggtaaaacaagtgaccaaacagaaaccaagattgccaaaatgctggaggaacatcaatgggaagtgtaaaaggaagaagagtgggagcatgaacctctctaagagcctttgtctgtgcagctagagaaaagtcagaacacagcacctgaaatagaaatgttctatctcagctctaacttaggtagaaataggattttataatatgaggggatgtctggttcacaccttatgggaattgaatctttttgtactctttttaaacataaaagtcattatagggtatgtaaaaagaaaatacaactttacaaaggtttctcaacaaaaagaatttttacagagccatggggcagtaatcatccgacctgaaaaatagccttagatccctcataaaatagtgctttgagaatatgaggctagatttttattttctaataaaagatcctaaaattattagtgaagctaagttgtctaagtggactgtaaaaatgtcccaccagcaagctggataaagcttagtgctaatctcagaggtgacagagagggagtctcatgatgcctgagataatttctggccattagtggtgttcacgttacagttacattacaatttgaaatgaaagatgtttaaccttttttttacagaatactctaaaatagggataataacacatcatttgtctatctgatacaacttcataatatttatagatacttttgaccctataacatattatccctattgaattctttctgccagatcactagacttaaaaaaaaaaaaaaaaaaaaaaaaaaagatttagaaaataaatctggtttgatttgggagaagctagaaagtaaatgacccctacctgtgagaggctccactggggctgctgagcttgcggcaggccaaacttactctggggtgcacccatttgtcccaccattcctccttgggggccaacaacgttctgaggaagtggcatcacaccagtttgtgcatttcccataaacccattgggcatgggcatgcccaccatcatgcttggactctgtcccatcacatttcctataaggccaggagctgcaggcacaggcacgcccatcgatggaaagccctgaaatgcagctggtgcttgtgaggtaaatggtatatttgtgggtcccataaatacacctgcaccacaaaaagaaaatgaatgaagacagagctatcacgtgtagttgcactcatctctataatcacagaaaaattgcctttctgaactactcacagcaaacattttaattccagtttggctgctcctactactcagaccaacccacacctaaaccctgagagctggttgtttctaggatgcagacaaatcagttattaacctgagtaaatttaattaagaaatgtaaatcatatgcaacagccacacaaaatatcttccactgtgaagaccaaactatgtagcatgacatcatacactgttttattgctgatttgtaccactggtcccccagtacgaaacagggaagtgagagctgactatatctcgcttcaataggtgtagtgggctgcccaacaattttagctcacatgtgaaatgcagctcattattttaaaggaaatggtgtgaaagattaaaactctgtaaacaataaggcttatgctaatattttgttatgattacaaaaaaattcatagattttttttaatccatgtggtaactcaagactgtttacctgcagagaaaatacactgtacgcagtcataaacttcatgcaaatcgtttcaataattcatcaaagataatccatgttctataagcttgtgaaacaacatttagtgatctatgaacagcttgttaattccaaataaagttctgtgaatcctgtacatgcctcttaattttttaattctaatgctcattcatttcggcttcatagttgtataaactgcaacaacaaaagcactcactacatggaacaataaaagatatataattgatcttattatataattacaaaggatgtacttctagtaatgtcactgaaagcagatatcaaaattcattaccaggagtactttgctgttgaatggttcctgtgccatacagagataagatggagtctttggaaagttgtttctttgccacttcttctgattttgtagtttgctcagtgaataaatctagatccccagatgttactgtagacagggttgcagctgctggtgcagagggtgtcccctgagacaaacaccaaaataagctatcaaattctgcatagtaaagcgcagcttatccattacttaaaatccaaataaagttataaaattagataggaatcaaacaattgtagaaggtaaaatggtgccattcaagaggatcacttacaagcccaagcccatataaaaacatctacaatcaagacagtacttcttaatttgaatctgttaatgtaggtagactgaagcattttcacagtaagttgcatttactacctaaggtgacaccaagtttttgctcatcaaatcctggggctcaacaatagttagagatgagaggaccaccactccatagcaactactgcttcaagaaactggtatcctttggaataaagaacatttctacaactacaacagactgtaagaggatttgcaatggctacttaaaaggttttatcttttcaaaacctgtatcataggatttttatacatctaatcagttttaactacaatattagactgcttctaatctatccagaaatgaaggtacagcaaaactttgaccatctattgtctgaacatatcctgcccttcacttttggacaagggggcaaatgaacacaaatacaaataaacatgtagatatttaatataaaatattctcaatctcatatcttgcacacactattatacaatcacaactgctaaccttaatcatctccgtagtcactaaacattaaatcacattcacatgttatatggacttgttttgaatatgaagagagtttcaaagaattctatgaagactagtaaaagctggctgatccttctcaaactacagaataaggtgagttgcaagtggaaattaaattcaaacatttaatgtcctcctagaacaccatgcaataagttaccatccaaacattgtacttataaactacacagtattttgaatcttatgactaagcaagaattgtaagcgacaaaaagccgcttaattttccaaaaattcaaatatgtaagaaattagatatcatggaatactaaatatcacaatacccctgaataaaatatatctaagctaccaatgaagcagcagcagatcgtagagctaagagcatgggctggagcctgtctgccaggactagagcctgcccccatgactttctgtggtacactcagacatgttactttacttctcctttcagtctctctcctataaacttgggataagcttaatgatcacaaaagtgttctgcacaatggttggattaagtacttggtgtttattgttaatattgtttataaaacaaagcaactacatcactaagtgatctttttatcacacttagtatctgttcaacctaaaagtctgctgaaaaccctggggtctattccctgtggataagagacaactataagaaaacccaaaatgttgggaagctatgattccactctcatagtagagcagcctaatattcacatactgtaaacatcataatatgaaatatctacctcaacaaggacacagtctaaaaacagccaaaccaatcagcaggactagtaagcactcaaatgtccacttactttctggtgctccattcgccagcactacgaccccaggataaaagggaaacaacttctgcctctcattttacacttcaggaagctgcagagcatctaatcgaaggctctctggccttctgggacccaagggcttaaccaagaaaaaacaggacttagcccttgtgtatgtctaggtactgttgttatgtatatgtatatgtatatgtatatgtatatgtatatgtatatgtatatgtatatgtatatgtatatgaaagaacaggaaaggggtttctccatgtcaacaatgaagactctggaactgttcctctccagcccccaaaacacaggtacactcctgtcagctaagtatttctaactaacccctttaagaaagactagaccccagacaggtaaggcagatggtaaaatcaatctatttcatattcataagttagaaaatattgtactagaatttgtatatactcagaaaataacacaaggagtgaaagaatacagggttcagaagaattcaaaatcttggtgtccacaactagtttgagctcaacttcacatat

SEQ ID NO: 95574 - DNA, 206241 bp, Homo sapiens
tcatctttttcgtctgaccagaaacaaaaaattagagtcaaaagtgacctcatctctctaagaatctgcaaaaacagacccttcaacttcactccccatccagcaagcatccatagacaccttgacttccaggagttcatcaggacaagttactacacccctctgagaggtgtcactaggcacttctcttcatttagctgtccgcatccttttcctaaccataccacatcacctctggcctcaaagaaacctataatcattgcttgctcctacttcacttctcacacacactttggacactttccttactttacactcaatagttaactctagcactgcttcctatccttgtaccttttttcttttttcccttctaaccgtccccatccctccctcaatatttcatggaaccctccagacaatcacaggctttggaagtctcatcagatgatttatcttctcttgttcttgagctatgaaagaaaacaatgaactgtgcagacccatgaccacatgctgtatgtactgtctaaaatggaaataattgacttttctggaatagttggcattggttggtgttcaccctttcttcttcaaaactgttccttccctggcttctggttctccactgttttcaatggttcacctttctctgtccactcttcatttagtaggcaatccccagaattttgtctttaggtctctcctctcctttgtctatgtgctttctccgggggaatgtcatccatctttacagcttctatgaccctttaaatgcaaataattcccaaatgacttttaccagcagtaactcctctccagagttctagaagtcaatatacaatatctcattagacacatgaagctggatgtcctaggcacatcttaaacttaacatgtccccaagcaaatgctgcttctccccgaccccaaatctggactatctcttttgttctttcttgttttttcagtgtcctctttttactgttttgcagaagaatgcccaacatacaacatgattgcaaatatttggctatgcaaaagaggagatagtgctcaaatacaaatgggagacatgactttttaaaaaataaatatttgccaggcatggtggctcacatctgtaatcccagcactttgggaagctgaggcgggtggatcacctgaggtcaggagttcgagaccaacctggccgacatagtgaaaccccatctctactaaaaatacaaaaaattagctgggtatggaggcaggtgcctgtaatcccagctactagggaggctgaagcaggagaatcgctcgaacctgggaggcagaggttgcagtaaaccaagattgtgccgttgcactccagcctgggcaacaagagtgaaactccatctcaaaaaaataaaaactaaaataaataaatacaaaataaataaataaatatttaaacacaacttgggttctacaagtgcctggactacaggtctgtttgaaggagctgccttgtttgttgacccatggtgatgtcataattatcgccagtaatcaatgcgtggattcagggtgccaatggttgaatatgatcatggtgaaccccttttctaaagccttctctagtcctctacagaggtactatggccaggaccaagaaaatgaaatttctcaaaggtcagtggtccataacagttaagtatgctacatgattctcttggttttcatttctagtgaggaaacacacttactcttcttcaattccacatacaggacaggcctaaaagctcctcccatatctctgagaacattagaccatgcactcttgaagaaggctttcccttttcctccttaaaaatcttcctccagcaattgagggttcccatgtgcagtatgttggctcctttgggtctgcacagggcccaatgggtagaaggtcatgttggccgcaccaccacagtctgggcaatcatctggctcaccatgatgtggtggtcttggagtcagggagcatgccttaggccttcaggctgcccagaaaaggatgatgccctgcacagagatgctgaagccctggtacaggccccagatcccatcagacttacttatcttcaccagacagtctcctaggtctttgaacctgaatcccagctctgtgtacgatttcccaacattgaccaccagatgggttctggcaaaacccagcaagtacacaaaacagagacaggtggctctggccgccttgttggaggccagattgtgggcaaaacagctctagaactgtgtgtgttcatccatactcccaggaatagctgtgtctgcttatccttgaatgtgatgttgagggcttgcttaagaaagtagtccacaattcctgtgcactgctgtcagctgtcacctgcttcctagcgccttgcatctgctacagcagcttcacctgctcaatcagggccacaactatcttggcgacagcagcagcaatgccaccagccagatggtccttggcaaaggagatcgcctgttgtgtcatggttgcagagcaggaagctgagcacatggagaactgggaggattagtgctgctggctcagccctgtgactgctggacctagaggcctacctcttctattcttgatctgggttaacggcattaccatttacctttctcccaacttagaaagcttgatgttattctcaccttctttctcttgccctccacatacagtcagctgccaaatcttgctgcttctaattttaaaccatcatttgattctgtctctcccaaaccctacgctacttgcttaaaataggccttcatcatatcttctttggactattattgagacaggcctgtaatctgttcccttgataagtttttccccaccatgttctccatactgccactgtatggagagttactgagaagaaagcttatcaagccatttttccgtgtaaaagcttctattggttctataaacccatgaggttcaaactctgttgcttggctacaaagctcttaaccctctggtggcaatctacctctccatcttgtttcctttcctaccttcatgttctccaaacacattctaggtttcttgggcctcatatcctcactatgtctagcatataaccctgaactttcagaagtccatacgtgttttttaaagcaattcctttctctccgctccacccccattcacttgaaaaattcccccatctgttaaaagccaagtttaagcatcacctcctccgtgaaactttcccagattttcccaggctactggatgttctgttccttttgctccgagaacactttataattgctataaactttacagtgtagtccttttctatttacatatttgtagctcatagtagactgtaagcttctgattattagtgtactagatagaagttgtttgataaatactggtgaataaatgcaatgttgttttcttcccaggatgttttggggaccagtctctttcttcctactatagtcttaaaatacaatcaactcaaatttatattttaatagcctctaagctgaccatctagaaccacactattcaataatgtatccactagtcacatgtggctgctgaacatttgaaattcatctactccaggctgggcgcagtgcctcacacctgtaatcccagcactttgggaggccaaggtgggaggatagcttgaggctaggagttcaagaccatgctggcccacatagtgagaccccatggaccagcagggtctcgaactcctaggctcaattttttgataatttctttattaaaaaataaattcagccactccaaaatgaaatgagctgtgttatacagcattttgaagagaatatgaaaacaagaatggaaagaaaatatgccatgttttatattacatctcaaaaatattttggatacattgagttaaatcaaatgtattagtaaaatgtattttatgtttctttttctgtttttaaatgtggctactgcattatttaaagttatacgtgtggcacgcaagtatttgtactggacatcgctgtgacccttcaatccatcctgaaggttgttttttggtggtaaacctgtattctgtttttctgagtcctcacagtgctgaacagaatttttgtagggaggagaggtactcaaaaaatggtgtttgtttactggttactgcaggactaactttcccaaaagatcctttttattatgctattatcctacttgaagaatctacaggttttctttttctttttttggggggggggtgggtggggaaggagttttgctcttgttgcccaggctggagtgcaatggcctgatctccgctcactgcaacctctgcctcccgggttcaagcgattctcctgcctcagtctcctgagtagctgggattaaacaggcatgcgccactacacccggctaattttgtattatcagtagagacagggtttctccatgttggtcaggatggtctcgaactccccacctcaggtgatccrcctgcctcggcctcccaaagtgctgggattacaggcgtgagccactgtgcctggcaaaaatctacaggttttctactgtcaatttgcatcaaggccagactactttgtctggcttcccaagtcttccataaccctatcatagtttacttatgcagccttatctcaaaagtagtaccttttgttccagtctgttttccaaggtacttcaggtcttcatgcttttgtgcaagctgctctttcttaatatctccctccccagtccccatctaaatccagcgtatcttcaggacaaggctcgtaagttctacctcccacataatgtttttttctgttcattggaactcaccaatatctccctagtagttatttgtcagagctatgtagtataagctctaatttgtttaattactgagcatcttcattgccatatccattcaatttaattccagaaacatttttgagcccctgtgccaagaacagggctaggtagcaatgagggtcacttttatgcagggacaggggctagaaattggccttactaagaagtgtaagaccgactcttgctcattgcctttcttagcatctgcttcatcgcaggcaaggactgtgtttatttggcttgcataagccccatattagaacttcctcataatatacaacatgccaaatcatcgaaactgcgtcacccggagttcaaacttcatgagcctggattagggtctgggttccaatgaaaagtgttttctttagttctctttctcttgcattaaggatcactatttacacagcttcttgttaaagtatcaccgcctagtacttgggttcctggtcacactttcccccttatggaagggcttactgccaggtctttcagactctggagccagactgctttggatttaaatctcaactcctccactagtagttctgtaatctggtcaggttacttaactcctctatgcctcactttcctcccctgtgtartgaggataacaatatcataaggttggggaaagggttaaatgagctaacagttcgtttaacagagtaatcactcaatgaaatgttatcccctaatacatgtcactactagattatttctcgcccttaaaatgtaagagaccgtttttcctcttttcttccatccgtgtctccagcttctaaactgcaggcgaataaacctcgaatgagtaaatgaacccacccagtcgctagttatttctgcatttccaatgttgtgccagcaagagcaaaggcaaatgggcaagtcaaagtaggcttcttgtaaaaggtcttccattactgggttttactagaggcccttgcggaccatcacatctcaaaaggggggaaagctcgtatgaggcagtgccagctacctttcgggaatcaccttgggcagaaggcctttttgcaaaaagactcggcagcccgggccccgtaggttcggcgcatgcgcagcgcgctcggcgcccgggttccttcctccgcgccacccggaagcctcggcgcgacccagtccccctccccctcccctcgccggctagggtggtgcgtgccggcaggccggtcaaggaggcgggacacgtcggcgctaccaccgccaccgcygccgcygcccctcctcccgttccagctgccgctgccgcttcctgggctgagtccgcccgcggtcccggcggcgccaggtgcgttcactctgcccggctccagccagcgtccgccgccgccgtagctgccccaggctccycgccccgctgccgagatggcgacgcgctcctgtcgggagaaggctcagaagctgaacgagcagcaccagctcatcctatccaagcttctgagggaggaggacaacaagtactgcgccgactgcgaggccaaaggtagcttggacgtcgtcgctgcccacggtcggggcctcttgcgaccggtgaccttcccgccgctgcggcgctcggggcccgagcggacgcctcggcttcgctggccggctcctgccctgactggagggcgggtggctgagcgggcgggcgcggggctcctgtcgaccctcaagtccgccagaggcggcggcgaggtcaggcccgcaggccctgtcagtggccccagcctcccctcctcccagacacgggtttgagcaggtgccagggtagcgatgctcggaccctccacagggctgggggtaggagcgaggctgggagcgcggaaccgggcacgggtctgggcrgagcttagggttagagagttgccctcctagctctgctcatagctatctctgtgggtggggccgcgcttaggtctggatcccctcctctaccctccggtgtgaccacgtcctcccactccgggctyggattcttggtctcctagatggagccctacctgcctgcccacctgacagcttttgtacaaggcttttatctctgcttcctgaaaaagagtatggtggtctttttcggtgggtttgagttttacggaataaattaattggagaaaggtctttattagtagtagtattgttttttagtctggttattagccagaatgaagaggaatttcattacatgagtctcttggaggacggtgggtttgtatttctgaagattttagtaattaggttttctctgaccagctagtttgggagaatatgtggacactgatttgtgtacctcataaatgctgaaggttcattttaaagatctagagatggaaaaaacctaattttagttttttcggttggagggcttctgcctcagcctttgaaacagatatactatttttagctgctatgttttgtgtttggagatctgatttatgtttaatgtcttgtaagtaatctcaagggaaatatttcttttttttttaaagaaatgtcttgtgtagttaagaaaagatcgtgtatatttttaattggtttatttcgttattgggtgagaaatagggtagttctctaaagcaggagacagtctctttggggaatgtcctttaagatttctgtgttatttgacttagacttttcctgaagctttactgttctatctcaatactatataaatgagtcacatttcagtaggctgataatatttgactagactgagccacacagcatcagcaggttacttcactgtcgtaacaggtactgaattactagaagaatcatgcgggaatactgtaactagattatttttatgaagcacttttcaatatagtaacttgattgagtcaagattatatttatcctatgtaaccttttcaggtgatgagtttttacaaagtccgtgcctggttcttgtaayacttgttttcctagtaacttgattgtgtgtggttatttgggagttctgcactgtgtttaggctcagttgcttgctcattgactgcactagcaaaacactgaaaaatggtcctttaaaaggccaagaagaagaaagaagctgaagctaaatagtacacattttgtcattttgagtaataacatggttaagtagagatgctggtaaatattaaatctgttcattaaaagtcgaatagtaacagtttcagaattaaccttccttcatctacagactttattaaaaataatttaatttttgttcaaatttctgtctccaaaaaagtactttataaaatcagattttcactaatgctttctaaaataatacagatttttaaaagccattattaaccatgttaactttttttttttttatttactcttttgaggtggggagaagagaatcatgtacttcttaaattaggatcaaaagttttacttctttggacctgaagaataggaagtattcgttttgctcagtgtttgtattgccacggaaatcagtagatatatattgaatgaatgtcttttgtattttggttttgtctggccttttgttggtttacttgttttgagaagtgaaggaagtgggagagaagagaatggtatcaagagtacaagggtgcagcttgaagggcrtgaactccacagtataatttacaaggattatttttttcttgttgctactaaatctagaagaatattaaaatgatcttgtaaataattycattgttttatcttgatctttcaggcaaaaaatcacaggtaaggccacttattgatttaattagacttgatttcatggttgtaataattgaaaaattcgacatgatagagcaattgatgtaaatatattttcacagtttttgagtatttggtaaggttgaagtacattatggaggcttttttagtagaattcttggcttgttacatgattttggatctatatgctaggatgacataataaatatagtacttttaaaagatatgttaaaggtcttactctacagctcagttactaagaagtttcattctgtgtatgtattgatgttttcttcactgtctagtaaattgcatcaaacttttcatgtactgtatttcaaagttatttcctagttaactcaattttctttctttcaaagaagcttcttccactgatcttkgagaatatgtaccaaaactaaagcttaggatttgaggtgcctgtattatcttgccttatcatagttggtagaggtatgtcaattgggttttgacattttcttactgaatcaccagctgtgtttcctggattgacagtatttaggaagcaacgaaggagaaaaggatggcataggcgccagtttcctgctcttgatcctgctcttaccaaatctgttgaacaactggagaatttaagaacaggcagatggaactactcctcctctctcctagctgcattcatgactcagtgggagtttaaagcagctcttgttggttattagttggtggcactttagggagcagtgaggactgggaatgccttgccagcttcaagtttagttttcagtatttaaagtgttatctacaggtaattctagctttgatttttgtttttttttttcacttctctattctttcacatgctctgaatagggcatcttgtgttggacatcaggagtagcctgaacttggctgagtagggctcctagaaaacatcgctgggcttggcaggtaccacattgacatgtcccatgcttgttaatgtatatttctgagattttaaaagtgcattcaagaccagcctggccaacatagtgaaaccccgtctccactaaaaatacaaaaaccattagccaggcatggtggcaggcacctgtaatccctacgtgggaggcggaggcaagagaattgcttgaacctgggaggcggagaggcrgaggttgcagtgagccgagatcgcgccactgtactccagcctgggtgacagaacaagactccgtctcagggaaaaacaaaaacaaaaacaaaacatatagataaaattcacattgagcggtttcttcccactatcccctctccccagcccttggcagacactattgcatgttctatctctgtaggtttggctgttctggatatttaatataatacaacatatgaacttttgtttctgactttgacttcatatgttttcaaagttcattcattttgtagcatgtgtcggtacctcactccttttatggctgaataatattccattgtatggatagaccacaatttatccgtctattgatgaacatttggtctgtttccatcttttgctaggtttgattttgagcatgtttaaattggtatgaaagtgagtctcttgcccattcaattttgggtagtcagaaacataaggttttttaactctagagattgttttgtttagcctgtctgatattgagagggtaagctcattgytgagatcaaacactcgtttctttgttccgcagatcttgacttgaagacacactgttagatattgtattaggtaagagagctaaaaaaatttgtaagacctaaaggagtttgtttagtgtgggttgtgtttttgcaaataaatgattctaaaacgatgtgctaagtgcttgtaataatggttttaagaaataactacctctatacttattttgggctgttgttccccttgcaccttgacttttgcccattggtggtctttacagttcctagaatgctgtttcaagacctttgcacgtgctgttcttctgcctgggaagctttctaacaagtttttgcctgctcagcttttgctcatctttcaattcctgcttaaatgtcttttcaagggaaataattctccttgatcctctgagattaggttaggcttccgtttatacataaaagacaacaccctgaatcttttattgcacttatcacaattgtaattaaacattatttaggtaattatggggtacactgtatccctgctggattatagctgtaagagaggagaccttgtttatcttggttagggtagtatccccagttttcaggacatgtggtaggcaaatgtaacttagcaaatattttttgaatgaatgaatgtgtgaatgaatgagcacagagcccctggcaggcagcagggtgtgtgaaagggagtgcacctgtgaaagggagtggcatgtggagtgaccctgttgggaccagtcacagaaggagtcttcatttgagctaggttctgaaggtggagtgggatttcatcagatagagaaggaattaaaggacacagctgcacacacacatgtaccagtatgaaagaacagaagaagtttccatacggcccttactagataagctttctttaagcatgatcagttttggtagtctcaggtcagaggaagaactgggatagtgaggattgcaggcaaatcctgagttaggagatgttgaacagtggtccaagaagagggcaagaggacctraattcacacaatgtcaatatataagtcagggtatagagcaggaaagagatccactgtagctattttcaggaatcaggtacttaccaagtcattggaagggctggaggagggaaagtcagggagccactgctgaactgctttcaaggccacacataccaccactgctaccgctgccccactgtcataactgcttctcacccaggagactggtatgctgatgggggcataaggcctatggagctgcaaccacttagtrtctgtagacgttttttgttagttgccctttctgtaggaatgtggcctctgtcccacttgtgctttccatgtgcagataattggcagatcctaattatgtccaataccttgccttcaagggagtcttttagctttctaactttttcaaaaagtagaaacgtgtagagcccatttgattgcaagagccaatccaagagttcatgtttttcattaagtctttgatattttagagttgttacttttaaagtgtagtaatatttactaaaaagtaaagttcaccttggggaactggtgtttattatgatgttgatgcttataggacaaatttatataagtgaaagtctgattataattcacctaaagaaatttgccaatctaaaagtttcctcaaaatgtgaaacttcagtctgatgggtctgttgttcttgtaattctgctgatctcgaggtttttcctgattgggcagagccctggtatcagagctgagatggaaaycattggtctctgactcatcagtttaaaacttgggctgcatgttgtctcccctccttttgttcttcacagttcttctttgtcttttttgtttgtttgtttgtttgtttaagataaaactttcagtacttgacttcattaattaaggaggcttacatctcctaaattgttgctgtacaagatatatatatatatctttctccacctttattaacctataacagacttgaatccatgctctctttaaggcaaagtagaatgtttaaaacgatatactttataaactcaaaaaagtgctttggcattttttttttctttttttttctttttggtacagggtctcactctgtcgctgggctggagtgcgatgtaggctctctgcaacctctccctccttggttcaagcaatcctcccacctcagcctctcaagtagctggggctacagatgtgtgcgaccatgcctacctaatttttgtattttttgtagagaccacgtttcgtcatgttgcccaggctagtcttgaactcctgggttcgagtgatctgcctccctcagtctcccaaagtgctgtgattacaggtgtgagccaccacacccagccccttttgcttatttcaaacgcttctactaatcgtcttttcacggattagaattaagccattttagttcagtttctcaattttctcaatgaaagaagatcaaagaaacttggaggccattttgtagttattatcagaagagttgaccgccttacattcttaccactgtaaagagttgatttaacagacatttaattttgttgataaatcaatattttctgggcactaaaaagattaagtactacgttagatactactgtgtgtgttaaaaaagttttggatgccgggtgcagtggttcatgcctgtaatttcagcactttgggaggctgaggcaggtggatcatctgaggccaggagtttgaggccacccctggccaacatggcaaaaccctgtctccactaaaaatactaaaattagccaggtgcagtggcacatgcctgtagtcccagctactcgggagactgaggcaggagaattgcttgaaccctggaggcggaggttgcagtgagccgagatggcgccactgcactccatccagcctgggcgacagagtgggactccatctcaaaaaaacaaaaacaaaaagttttggatatagttgtctacaagctagttagagatctcagtagacatgaaacaattaccagttaacttctaatctatgtttacattggtagattcattagaagtttagagatagggtagctccattgtgacctggagaatgttaaaaaaaaaaaaaaagcaaataataacattacatatatactcacaaattatatagkgttttttttttktttttttttttttttaccagagatgatgtacttcacactttacatatactaactcatataatcttcaaaacaacctttgaggtaggtaatattattacccaggtacacagaacttaaagtagtggagccagaaattttttcattaaaaaaattttaggaggcctggagcagtggtgtacacctgtaatcccagcatgttgggaggccgaggtgggtggatcacctgaggtcaggcgtttgagaccagcctgcccaacatagtgaaaccccatctctattaaaaatacaaaaattagttgggtgtggtggtgcactcctgtaatcccagctactggggaggctgagacaggagaatcacttgaaaccggaatgcggagcttacagtgagccaagatcgtgccattgcactatagcctgggcaacagagcgagactccatctcaaaaaaaaaaaaaaaagaaaaaaacaacttggaggggagtgactggcactttcttaggacctggggattagcaggggataggtagataaggttcatgctcaaaaggatctgttagtcattggtgtggagaaaagagttaacaaagcaggccttgcggtggttggctgacatctgaggggaatcttggggatggtcccaccaccctaagtgatgagtctgtcattgtgcctaagttgtttgtataataaatatggtttatgttgaatatctgcttttcttctgggattctggaattggcatatgtgccagccagggttacctacatgaccagtctccctaataacctttggcactgagtctctgatgagcatccctggttggcatcattttacatgtgtggtcacagctcactgctgggagaattaagtgtgttcattgcaactcaactggaagggagcacccggacgcttgctcctaatttcccctggactttttgtgmctttctcctttgctgattgtgcttagtatctttttgctataataaatcataacgatgagtacaactgtatattgaatcttttgaatcttcttagcaaattactgaacatgagggtggtcttggggaactcaaagcataattggtaatatatattttcttccagtatattatacaggacatgttggagcctcagtatatctgtgctggctctataacctagcctgctaataagggtacagtctggaggagcaaggatgaacattagaggcttttataacctggggaaattgtgattttattgagatgagataggggtgggaatctgaactgtagagtcaggatttgagcccgggagatatagtctgtgctgttaactatgtttgatggtatgatagataaaacacctgtttttgttgtagaaatttgtgatgtaagagattgttgttgggaagactgtcaccttcggctaacttaaggtttttctcagattattgccaaatgtgttcaaatgtggacaatatcttcattttagtttccctccttgcatttaatagcagaaccaccataacttcaaaataccartttaaacaaattggaatttttgtctcatcactaaagtttattttatttatttattttttccttgttatagagacagggtctcatgctgttgcccaggctggggtgcagtggcgtgatcatagcccattgcggcctctaacttctgggctcaagtgatccacctgccacagcctcccaagtagctgggactacaggcttgtcaccatgtatggctaatttaaaaaaaatttttttgttgggtgtggtggggaggggccttgctatgttgtttgggctttcaaactcatggcctcaagcaatcctcttgcctaggcctcctgaagtgctaggattagaggtgtgagccacctcaccttgcgtaaactttattttagaaacttactgagtccacagataagtgctttagtgtttttmtttgttttttgttttgtcttcatatatatatataatttttttttttttttttgctatatccttaggtcagatactggtcatctacctgggctttttaaaccatagaaacagcatgatagaattgaaagaacactagcttggttgagcaaagctaggattcagtccaagctttgcctctgacttgcttagtgaccagttgtccttgttctctttaatccttattgcaaagatttatttcaaccttgtatggtctgtgttctttcttgaatcccataccttgtcacttctttttttttttttttttttttttttttgaggtggagtgccagtggctcgatctcggctcattgcaaactctgcctgccgggttgatgccattcttctgcctcagcctcccgaggagctggtactacaggcgcccgccaccgcgcccagctaattttttgtatttttagtagagacggggtttcgccgcataccttgtgacttctatgtcagtgtttactattattattaawtatattattgagagtttattttttgagtcctattgagatatggattgtcatcaaacttttatagtttttatttaaagcttttcactgatgatttaggtcttgctgagcaaatttacctagtattatctttaattatcccaagctatatcacacaactcatacaactcttccccacaggttgaggagtccttttgtttaaaattgtttcactgtaatgctttcttactattaatgtcagtatttctacctcasatgttaggtagaactgtgtttaacttggagtggcatttagttactcagatgttaggtagaactgtgtttaacttggagtggcatttagttacagtatcatatagaagtgatttttaaaattatttcacttaaaacagagcttagataaagtgctcttggaaacatgctaatttgatgtttacatatattttgagtgataaatgtgaggaccttgagggtccgaaggaaagagaattaaaagtaattctaataatcttccattctctgtggcccctataccccagcaatttttggtctccatttgactagagatccaagtgattgatggtagaccttcagatgtctcttattgatcttttataaagcgtgcctttcattgagcagtgatgagctcaagcctaaacttaagaaaataaggggaattctgtgggaaataatatttgggatagctttatcttccattataggaaaaattcataaaaattatgtttagcstagggcgttatttagttcatgcatttctactcttggaagttgcttttggtgtagggtgatgatggtgcacagtgacaaaaaaattaacagaagaatgtttaagtgaaatgatcatcaccagtatattaatttcctgttgctgctattaaaaaatcctacaaactgaatggcttaaaacaataccaatttatcattttagcaggtttgcaggtcagagtccaaaaagagtcttattgagctaaaggcaaggtgttagcaggcttgcattccttttggaggttctaggggagaatctgttttcttttccagcttggagaggccacctgcattccttggctcatggctccttcctccatctttgaaactagcagtgtgtcatccttgattctgctcctccttgccctccacttccatcattacatcttctctggcatgtttatgaccttttggctttatctgggtaatacaggacaatactgccatctcagtgtccttaagttattcacagagattccaaggatagaacaggacttctttgggggccattattctgcctaacaaagtggatttgtgataaaaattatatatggaatctagattttttgtttttttttttttgtttttttgagatggagtcttactctgtcgcccaagctggagtgcattggcatgatctcggctcactgcatcctctgcctccccggttcaagcgattctcctgtctcagcctctggagtagcttacaggtgtgtgccaccacacccgcctaatttttgtatttttggtagagacggagttttgctatgttggccaggctggtctcaaacccctgacctcgagtgattcgcctgccttggcctcccaaagtgctgggattrcaggcttgagccaccgcgcctggccagaatctagatttttataagtggtacagagttgggtgtatttaagatggtatgggatgatgaagtactacttaaattagcctttctcacaggacctatttaaaaatacatgcatgcaagagtcatttaacaatctctttgcaatgggatcatttatgtaggaaatcccaagaaatttatagaaaagctattagaatgaataattgagtttattaagtttacagaaataaagtgactatagaaaaagtaactctatatactagcaacaaataattggaagttgaaataaaaattatgatttataatagcataacaatatgaaaactgtgggataaatttaacaaaatacgtgcaagacctgtataccaaaaactacagaagatagctgagagaaattaatgaatactgtacctaaagaagtggagagaggtatcagagatatcatgctcatggattagaagactcaatatttttaagatgtcagttctctccaaattagtctctaaattcaacattattccagtcagaatcccagaaggctttttttgttgcaactgacaagctgattctaaaatttttaatgaaatgcaagggaccttccaaaatcaaaacattgaaaaacaaaaagaatgtttgaggtcttacacaacctgcctttaacagttattaaaaagctatagttatctgtggaacataatacgtagtccagaaatagactcacatattatggtcagtttttaacagaagtgccaaggtaactcaatggagagaaaggatagtcttttcaacaacaacaacaacaacaacaacaacaacaacagaatgtataataccttgaaccttacctcagaccattcacaaaaactaatttgagatggatcataaaactaaatttaagagctaaaactataaaactgctagaagaaaacatgggggaaaatctctgggaccttgaattaagcagaggattcttggataggacacaaaattatattccataaagttaaaattgagaaaatgaacttcattaaaattaaaaacttttgcttttcargagacacttaaaaatcatagatggctgggaaaaatattttatctggtaaggacctttattcagaatatctaaagaaataatgcaacttaataataagacaaagtaaaacaagcacttgaatgttcatagcagcattattcataatagccaaacactggaaacaattcaaatgttttatcagttgacgaatggataaagaaaatagtgcgtccgtacagtggaataatgttttacagtacaaagcaatgaactagtggatgagtcataaaaacattatatttacaaaagaatccatacacaaaagacaacagagtatacattacaattacatggatttcctgtttttttttttttttttttttttgagttggagtctcactgtgtctcccaggctggagtgcagtggtatgatctcggctcactgcagcctctgcctcccgggttcaagtgattttcctacctcagcctctcaagtagctgggattacaggcacgtgccaccacacccagctaatttttgtatttttagcagaggcggggttttgccatgttggccaggctggtctcgaactcctgactcaggtgatctgcccgccttagcctcccacagtgctgggattacggttgtgagccactgcgcctggccataattacacggatttctattaaataaaaggataaaacttatagggacagaaaacaggtcagtggttgctaaggatcgggatgagggagtttatttaaaaaaaaaaaatacaatgcataggctaggaatggtggctcacacctctaatcccagcactttgggaggccaacgcaggtgactcacttgagcccagaagttcaaggccagccttggcaaaatgacgaaactctgtctctacaaaaagtgaaaataaaattaaaaaaaaatagctgggtgtggtggcacgtgcctgtggtgccagctatttgggaggctagggtaggaggatctcctgaggaggtcaaggctgcagtgagccgtgattgtgccactgcactccaacctgggcaacagagtaagaccctgtctcaaaaacaaaaacaaaaaacatgcaaatatgttgtttacttctttcgctgatgttaacagttactgtagattatgtagcagtttctcaattcttttatttgaatttttgtaacatatacactcctaaagttattttcatcttccttgaaaataaatttaatggtctgagtaaagattttgcagaagtgataaacttcttgatgctggtttaaagaatgaaaaacctttggtgccttttgtatgtgtgtgtgttttttatttgtgtgtgccaagtcaattagaatactaatgagtactttgaaaacattatggaaaacagtggtttaatgttttgtttttcttgaggagttgtgttattcatacacagctctaaagttgcttgtggaatctttagaacatcaggttttttgatgtctctaggtgcaggattttctattaggtgctaatagggctgcaggaatagcaggtaggggttcctttttcatgactaagagcaagcaagttctctaagaagcaagtgtggcatatctaggcaatatattaatgcaaggttttgagaaaatttaaaatacaaatgaaatggttagcttttgacaggagaaaaaagatcaggaagaatatggatcaatttgtgagagagtaagatgggtctgaaatgtgaggggacaattagttgatgaagtcatttgctgaaaataaggatagtgggacatcataggggatttaaggttattctctgcacagatttttttttttttttttttttttttttttttttttgagatagagtctccctctgtcgcccaggctcaagtgcagtggggctatcttggcttattgcaacctctgcctcctgggttcaagcgattctcctgccttggcctcccaagtagctgggattacaggcgcccaccaccacgcccagctaacttttgtatttttaatagagatggggttttgccatattggccaggctggtctcgaactcctgacctcaagtgatccacctgccttggcctccccaaatgctgggattacaggtgtgagccaccacgcccggccctctgcacagaatattggctaatagtaaatgttttaaaataatttaaaagtttgtaaaaaataatccctctccactgattggtatgttttctaacttttgtggttacatatactgctgctataaagctttgtgtgcgcactttttttttcagaataaaatctaaggtctatgttaaagagtataccagattaaaacccgtttgatctgtattgccagaagtgttgggaccagtttaccttcccaccactactatctaaagaatggctaggcaagtgctgtggctcatgcctgtaatcctagcactttgggaggccgaggtaggccgatcacttgaggtcatgagttcataaccagcctggccaacgtggcgaaaccctgtctctactaaaaatacaaaaattagccaggcgtggtgacacgtgcctgtaatcccaggtacttgggaggctgaggcaggagaatcacttgaacctgggaggtggaggttgcagtgaaaggagatcgtgccactgcactccaacctggcgacagagtgagactccatgtcaaaaaaagagtggctgacttactgtacccagtctgttactgggtattcatatttttaaaaggcttccttaatacagttggtgaaaatgttatactattttgcattttcttgatactcttaagatttaacttttttttttttttttttttcttgaggcggcgtctcactctgtcgcccaggctggagtgcagtggcacagtctcagctcattgcaacctccgcctcccgtgttcaagcagttttctgcctcagcctttggagtagctgggattacaggtgcccgccaccacgcctggctaatttttttttgtatttttagtagacggggtttcatcatcttgaccaggctggtcttgaactcctgaccttgtgatccacccgccttggcctctcaaagtgttgggattacaggcatgagccactgagaatattgaacattttttaatgtgctcattggtcatttctattctgttaggatttgctcctacattttgggagggtgggattggcaacccttttcacatttctctcttgaccagtcattgggccaagagaacacaaaattccagacagcattcattcttctgggtatcctggtgggccacaccattcatctccatattccacccataagaccgtgaataagtgggttgagcattttggaaaaatattttcagtttcagatctatatctatatatttttcagtaattatggaattgttgaaagtttagagatacaagagacctgtatggtatctgttcgagtctgctatactagagagataaaagaggttaaatgacttgttaaaagcaatggaacagtgagagaacatgggagtgaacccaggtcttctggaaatctgtctgttactttgtcaggtcacgtattaatgtgttacccttgaccttcacaaaagatagcacccaactttttaatcttttcattctctttaaattcagtccttgtgcacagtgagaagggaggtaaattgtgggtttttatgcttaaccaaaccgttatctatgtaatggcagcatattaacaagataattggttatcagagtgagcaaggattatctattatttagccaatttattcaaacataaatttggcagtaatgtaaacatgttttcaaaatttgggatatttgttgtcatctgcagtgttaactaggaacaaatggttatctctatataaatctgtaaatagcgtggaaataagaggtatttgtaaatatttttgtgtttgagagagattgtacagatagatggaaagcactagagcattggtgaaggggtgaacaaaataaagagggctttactgtgcttgatcagacttttgaaattttaagctgatttttttaaggatcctaagtcacctgggcaaagaaagaaattatagatttggcaagggataaactttaagaccatcaggtgaagcaaggattatggattcttaaaaattaagcttcattttcatttctccttttattttataacattctaatgaccaccaaatccttaaatgatcaccaaagttcaacttctttgccaaagtaaactaacatttaaaaaatttcaggggagtgaatgctgtatgtgtagattttattagttccttaaagaactttctaagtttttcagtgtccttatgatattttgaacttgtttacatttttattccttctacccaagtttatgtgataaagtaaaaaaaagtagttatatggtaatatttcctctgtaatattcttcctccagttgtctgtgggttagtagtcactgctcttctcttctcttttagaggcacactaggatagggaaaacatgggctttgaaagctcactgctctgttttgaaggctcagctctcccactgctgactctgatttctttctttcctttcactccctccttccttcttcgtggtgggggtgtggtatttaaactttatgagctccagtgtcattacatgtagaatggtaatacctgtgtcacagggttgtgaggattaactgagcttgtgaagtaatgtctggcacaaagtaagggtttgataaatgagtaggtgtttggtaattatgccaggtcttagtttttttttttgagcactcattcactttattactttgcaggaagcatttgtgaattatattttgtttggtaaaaaatgtaattgaagagattctgagactagaccagtgcaaaaatacttgatggaagcctcaggaaaataaagtagttaatacttttttttttttttaactttttatctgctgattcactagagtagacattagtgagagatacacagcagaaaccctaccctaccttgccctgaggagcctttactttaaagaggcaggccataaacacagagtgtattctggaaagtgtaatgcaagctttagatgttaaataaattcagagaaagtaaaaatcaccaagaatgggggctggggaaggtttttaataaaagaggtagttcttgaggaagagtgaaatcaaacttaaaggagaatggcaaagttatttcatgtaggaataaccaggtaaacaggtttgtgcatatacttagtggacrtgctttgtacgtacctttctgaagacaggtgtaagtactgggcagaaatgtcagggagaaaatagacaaagggacaattgttgatttgggagttatcggcatagaagtgtttcctaaagccatattactccattcaacacttgtctaaccagagggtcaatgatgaagattttgtagagaggcaatgggatgaagtagaatcgtcccattctttgtgaaggaagactgtaaggaaaaccagaacagagaagccttgggagaagaggtttttttaatttttttattattttattttatttttttaacacagaacctcactctgtcacccaggctggagtgtagtggcaccacaatggctcactgcagcctcaaacacctgggctcaaatgatcttacctcagcctcccaggtagctgggactacagatgtatgccaccatcagaggaactagaaaacgccatttgatttttgtatttttttggtagacattaaaactattttctaagctcttatgaaaatttctgtggtgaagctgaatccaaattgcctcagagtctgttttttttacctgctatgcagtgcagtaagatttaagaaagtgaatctttagtatttttatgcttttcttaggcagtcctttaccatttttaacacctttgccacatttcattgcttgttttgttttctgtgtttagtttacttttgaaacaaatacatattttctcttgggattctgacaacttatgtggtctgtgaagaaaattgtttggaatttgtttcgcagcggaaggaatgttattaatatgggtgtaaatggcccttgaaataaggcttaatggaacttttgtcagggttactttgttttgtttgaggaattatagttaactcttgaataaactgatacagttgacaaaaattggtttctgggagacttgtcagtgtatttttgaaaaaacacacatttcttttttagcacatttgctttcttatcttacagaagtacaattctttttgtataaatgaatataatagtgtcttttcagtacaattgggcttcttaaatatttgaatacagtatatacgaagtggtggttttataacatatatctgccctctgctggtgaaaatgcgttattgctgtgaatttaacagctttagtaatttctttgaatgtaataatactctgtaatttcaaaagttgtcataaaactaaacttgggaaaaaatacccttatcatttgaaaggaacattctmtttgggacagttctgcacaatgaattattctgcccaaaatgccagtagtgccctgtttgagaaatattgacctaatatactgatgatgatgatttttacattgtggctgtctctctgtgttttttttaagtttttctgtaagttctaggtttgtcctgtccagtgtggaagtcactagccataaggctatttaaccgaatttaaacattcactttcttaattccagtagcctcatttctaggcttaatagccactgtggctaggagctaatgtattggataatgcagattatagaatgtttccagcatcatggaaagtacagtttgacagtgctgttttaatttttaaattttaaaaaatgaggattatcattttcatgaagtaatcattttcttaaatttgtgatgaatttctttgccatgtattcttttcacattacagcagtttctcaaaaaacaattccaattaaccaagggaaatatatttagtaggattttaggttattaagattttattgtaccatgtaatttgctgcaacttatatatttattgctgaatgattatagtacatttttctcartgtagggcattgagtatttctagtattttgcttctctgttttgaagagtaaagttaggttaagaataatggtcatttttttgccgccatttagttgagataatagcttctttactcttttggtgcatgtttgggatggaaggaaagctatgaatcaaaacatacatagagaaactataatgtgtgaatcacagttgaatatatgttggatgattaaaaaaatacatagacacttgacccagtttctcctaatggtaacatcttgtaaaattatagacaaatgtcacaaccaagatactgatgttgatacaacccaccaatcttactgtgacttctgcagttttgcttgtacagtaatttgtgtgtgtgtgtgcatgtatttttattcaattttatcaaaagtgaagattcatatatctgccaccacagtcaagatatggaacagttatataccacaagaatctcttgtgttgccctcttaaaaccacacatacttttctctgtcccaccccacccatccattcctaacccatagcatccatgaatctgtttttcacttccaaaattttgccatttcaaaaatgttataaaaatagaatcatgcaatatgtaaccttctgggatcggccttactcagtgtaattctttcaagacacatccaagtttttgcgtctgtwaatagttcttttctttttattaaatagaattttgtgatatgtttgtgccatagtttgtttaaccattcatctgttgaaggacctctggactgtttrtagttttttagtattaaaaataaagctgctgttaacatttttgtatagatttttgtgtggatgtaggtttttatttctctgataagtgcccagtagtgcagtttgctgggttgtatggtgattgcatgcttagatccataaaaaaagtgccaaacttttcaaaagtggttgtaccattttatacatctactaatgatgtgagctatttagttggtcctttgccagcatttggtgttgtgactgttttttattttagtaattatgttagatgkgttgtaacagtgatattggcttcaatttggattctcctagtggtttatggtgttgaacatcttttcatgtgccagttttccatctgtatgtcctcttcagtgaaatgtctgttcatgtttcattttctaaatagattttgttttttactgttgagttttgaaagtgctttatatattctagatactagtcgtttgtcagatatgtgcaaatactttttcctactttgtagcttaactttacatcctcttcacatggtcwtgcatagaagaaaagttagttttgaagaggttcaatttattaattttttttatggactgtatttttagcaagtctaagtacaatttgcctaaccctagatcctgaagattttctcatatattgtttcctaaaagttttacagtgttatgttttatatttaagtccatgatccattttgagttgcattttatatatgatacaaggtatggatcaaagttttttttttttgcatatggatatttgatcctttgagaacatttagacagagtcttactctgtcacccaggctggaatgcagtggtgcgatctgggctcactgcataccctacgtcccaatctgcttcaagtgattctcatgtcatgcctcagcctcctaagtagctgggattacaggtgtgcgccaccacgcctggctaatttttgtagttttagtagagatggggtttcactatgttggcagggctggtcttgaactcccgacctcaggtgatccacccgcctcagcatcccaaagtgctgggattgcaggtgtgagccactgtgcccggcctgagaaccatttcttgaaaagattagtctttctccttttgcacctttttaaaaaagttaattgaccatgtatgtccaggagggagcacttctgaaatttattatgttccattgatctgtttgtctgcctttatgccaatrttgtacagtctttattactgtagcttcttaataagcctggaagtaagtaaggtagtgtaagtcttccaactttgttatttttttcgaagttgttatgcctattctaggtttcttgaattttcatatgaattttagaatcactttgtcaatttctacaaataatctcagatttcaatggggaatcatttgagtctgtagatccatttgagagagaattgacatcttttaatatagagtcttccaatctgaacaaaatatatctctccaattatttagatcttacttaattttgcttggcagtattttatagttttcagtgtatgggccttccttattttttgttagatttttccataaggttttattttttaatgctattgtaaaagatactttaaaaattttaatttctgattattactagtatatagaaataccgtaggttgctgcatacttaggacatcttgcaacttagttaacctcatttatttgttttcatagcttttttcgtggattctattaggtctcctacctagacaattatcatcctcgaataaaggcaatttttgcttttttccaawttgaataccttttatttcctttttcttattttattgcactgactagaacctttagtaaaaatagaagtggtgaaactggacttgcttgttttgttcctgatactaagggagaaagggttcagactttatcttttatgtaaaagtcttacagataccttttatcaagttgaggaaatttcctttgttgctaggttgctgagaattttcatcagaaatgtatgttgaattttatcaaatgcttttctgcatcttttgagatgatcatatagtttttaaaatcttttttttttgttttttgagacggactttcgctcttgttgcccaggctggagtgcagtggtgcgatctcggctcactgcaacctccgcctcctgggttcaaatgattctcctgcctcagcctcctgagtagctgggattacaagcatgcaccaccacggtcagctaattttgtatttttagtagagatggggtttctccatgttggtcaggctggtcttgaactcctgacctcaggtgatttgcccgccttggcctcccaaagtgctgggattacaggccacccggccggtttttaagttctttaatatattgaactacattgattttcacacattaaactgcattcctgggagaaactacacttggtcttgatgtatcttttatatatatatatatatatatttttgaatttgatttgctatgattttacatattgtcatgaagggtgttgaactgtaggttttatttcttgtgatatctttgkctggtttggtatcagaataattttaggctcaccaaatgaattagatagtattctcctcctcccccttccccccttccccactgtttttttttcccctcaatttccggaggagtttgtatagaactgacactattccttaatcgtttggtagatttccccagtaaagctatctgggccttgagtttttgtttgttttttgctgagcagattcagtttatttaatcgatattaggccattcaggttatcttttccttctggagagagctcatttctgtctttcaaggagttggtgcacttatagcataaagttgtttatgatattcctttattgtatctgtagaatctgtagtaatgtctcttctatcattgctgatattggtagtttgtattttctctctttcttcatcagccatgctagagatttacctattttattgatgtttttcaaataatcagtctttattttcattgacttttttgttgccttttggttttctacttcactgattttttaaaatttttatgggtacatataatagtaggtggatatatttatggggtacatgagatattttgatatgggcatacaaagcataatagtcacatcagggtaaatgaggtttccatcacctcaagcatttatcatttctttatgttacaaacattacagttatactattagttattttaaaatgtgtgataaattattgttgactgtaatcaccctgttgtgttatcaaatactagatcttactcattctaactatatatttaaacccattaaccatctcaattctgtggccctctgcaccaaccccctactcttcccagtttctggtaatcatcattctactctctatctccatgagttcaattgttttaatttttagctcctataaaagagtgagaatstgagaagtttgtctttctgtgcctgacatttcacttaacataatatcctctagttccatccatgttgttgcagatgacaggacctcattcgtttttattgctgaatatagtactccaatgtgtatatgtacyacgttgtctttatccattcccctgttgatggacacttaggtagcttccaaatgttggctattgtgaatagtgccacaataaacatggccgtgcaggtatctcttcagtataattatttcctttcttttgggtatatagctagcagtgggattgctggatcgtatggtaggtctatttttggtttttttgaggaatctccgtactgttcttcatagtggctgcactaatttgcccttttctccacatccatgccagcatttgttattttcagtcttttgcataaaagccattttaactggagtgagatgatatctcattgtaattttaatttgcatttctctgataatcagtgatgttgagcaccttttcatatacctgtttgccatttgtatgtcttctttggagaaatgtctgattagatcttttgtccattttaaaatcagattattatattttttcctatggagttgtttgagctcattatatattctggttattaatcccttgtcagatggagagtttgtaaatatcttatcttattttgtgggttgtctcttcactttgttgtttcctttgttgtgccaaagctttataacttgatgtgatcccatttgtccatttttgctttggttgcctgtgtttgtggggtactactcaagaaatttttgcctgggcagagtktccccaatgttttagtagtttcatagtttgaggtcttagatttaagcctttaatctattttgacttgaattttgaatatggtgagagataygagtcaagttttattcttctgcatatttatatccagttttcccagtaccatttactggagagactgctcttttacccaatgtatgttctgggcccctttgtcaaaaatgagttcactctagatgtatggatttatttctgggttttctattcgattccatttgtctatgtgtctattttttgttgttgtttttgagatggagtctcgctctgttgcccaggctggagtgcagtggcgtgatcttggctcactgcaatctccgcctcccaggttcacgctgttctcctgcctcagcctcccgagtagctgggactacaggtgcccactaccatgcccggctaattttttgtatttttagtagagacagggtttcaccatgttagccaggatggtcttgatctcctgacttcatgatctgcccacctcggcctcccaaagtgctgggattacaggcgtgagccactgcgcccagcctatgtgtctatttttatgccagtaccatgctgttttggttactatagctatgtactataatttgtttttgttttggtaggctgttttagaagatctgtagtataatttgaagtcaggtaatgtgattcctccagttttgttcttgttgcctggactattctgggtcttttgtggtttcatgtaaattttaggatttctgtgaagaatgtcatcttcytttttttttttttttttttttttaagacagagtcttgctctgtcaccaggctggagtgcagtggtgcaatctctgctcactgcaacctctgccttccaggttcaagcgattctcctgcctctgcctcctgagtagctaggactacaggtgtgtgccattacagccagctaatttttgtatttttagtagagacagggtttcaccttgttggccaggatggtctccatctcttgacctcatgatccgcctgcctcggcctcccaaagtgctgggattacaggcatgagccaccgtgcctggccatcattgtattttaatagggattgcgttgaatctgtagattgctttgggtagtgtggacattgtaacaatattgattctgacaggtggagaggccaggttggctaaagctttggcctccagctttggaaaatggcattgggggaaggatggaggggttgagaaaatgaaaaactgtgagacctggaagttgatttgagactcatatatttaaagcaaaattggttaaaaatttaaggggtttcttgggtatcactcaaagtattgaagatgacccatctttggatacccagcttctcttaacattgctcactagaagctcattttagaccctgattctatctttttcctacagtcatcataacaaatcttttgtttattcatgttgtgttatttttagcatttttaacagatgtggtttgttcttaccctaatctaaatgaagacaggtgcccaggaaactataccaaccctcttgaagttcaaatggttgtaatcctttggaaagttactttgtggtggattttctgtttacatcttgaatgctacatccagtatcaccacagcaaagtcagaaatcgaggctataacttgatctactgatggataaggcatctcaagagatttatgttaatgatacactccactggcaacacaataattctcttcatactgtgttgcagcattccttcctggaacccagcagatcagattatatcttgatctccttctggccatcctggccctggtgctgatctgttttctgatgtgtctgctcatttacacagtgaaaatctggaagtttaataaagctaagccatatcctgatgtacttgaagaaggaaaaatctgtacttaacccagcagtattacctcagagactggattcaggactatttgaaacctagaagaagttgttgaaaagcaaggagacataatagtatatatgaagcgacacaatgaagtgttgagtgactgttggctctcacttccttggacctagcctgttagccaagtagaatgtgagaggcttacagtcttgacagcaattgcagaagaatccagagtaatctcacaagctgccatagagaattgcagcttttgctgaatagcattttataatttttgttggaaacctgaatttggttctcacctgtgtggctgtataccatatagggtttgggggtaaaggtaccttgtaaacaccttaataacttgaggataatgtctgttgtttactttttgaaattatttaactgcttggtcttaggatcaaaggtataatttaaacaacaacaacaaaaatccaatattgaatctttcaatccatgaacatggaatatatttccgtttttttgtgcgtctttttcagtttctcgcatcaatgttctattcactgtggagatcttccatttcttttcaagtttatttatctcattgtatttgtagctgtcgtaatgggattactttcttgattgctttttctcattgtttgctcttgaygtagaaatgctactgatttttgtatattgattgtgtatcctgcaaccttactgaatttgtttattctagtagttttttggtagggtctttagttttttctaaatataagatcatattacctacagacaagkatactttgactttttcctttccaaattggatkccctttctttctcttgtctgattgctctagctagacattgtttgactattatgctgaataacagtagtgacagtgggcatccttgtcttgttccaggtctttgaggaaaggctttcagtttttccccattcagtatgatactagctaggggtgtgtcatatatggcttttattgtgttgaggtatgttccttccatacccaattttttttgggtttctatcataaagggatgttgaattttatcagaatctttttcagtatcagttgaaatgattatttggtttttgtccttcattcaatgttgatatgatgtatcacattggttaatttgcatatgttgaactatcattgcatccttgggataaatcccacttggtcatgatgaatgaactttttaatatgttgtttaatttgatttgctagtattttgttgaggatttttgcgccagtgttcatcaggatattggcttccttttctttgatgtgtctgtctggttttggtatcagggtgatactagccttgtagaatgagtttggaagtattccctcctcctctatttgtccgaatagtttgagtaggattggtattagttcttctttaaatgtttgatagaattcagcagtgaagccattgggtcctggacttttctttgctgggatactttgtattacagcttcaatctcatttcttgttattggtctatttagattttggatttctttgtggtttaattttggtagattgtatgtgtctaggaaattatccatttcgtctagcttttccaatttattggcatatagtttctcatagtagcctctaatgatggtttgaatttctgcagtattggttgtaatgtctcctttttcatctctgattttatttatttgtgtcttctttcttcgtctggcttatcttttgcttatcttttcaaaaaaaacagcattttgtttcattgatcttttgtattatttcaatttcatttatttctactctgatatttattatttcttttcttctaattttgggcttggtttgcctttgctttgctagtgtttaaagctacatcattatgttgcttatttgaagtcttctgcttttttagtgtaagtgcttattgctataaactttcctcttagtactgcttttgtcttatcctacaggttttggtatgttgtgtttttatttttatttgtttcaagacatttaaaatttccttttaaatttcttcattgacgccttggcctttcaggagaatactatttaatttccatatatttgtatagtatccatagttcttcctgttattgattgctagttttattccatcatggtcagagaagatatttgatgtgaattcaaattttttgaattttaagagttgttttgtggcccagcatatagtctatccttgaaaatgatccatgtgctgaggagaagaatgtgtattctgcagctgttggatgaaatgttttgcagatatctgttaggtccgttttggtctatagttcagattaagtccaatgtttctttgttaattttctgtctggatgatctaatgctgaaagtggggtgttgaaatctccagctattaacttgggktatatctttgtctttagctctaataatatttgctttatatatttgggttttacagtgttgggtgcatatatatttacaattgttatatcatcttgctgagttgacccctttatcattataaaatgacctttatctctgtagtttttctcttgaaatctattttgtccaatataagctactcctgctcttttttgatttctatttgcatgcagtatcttcttccatccctttattttcagtctttgtgtgttattacaggtgaagtgtgtttcttgtaggtaacagttcattggatgttgcttttttatccgtttagccactctttgtcttttgattggagagtttaattcatttatattcmatgttattgatatgtaaggacttaatactgccattttgttatttgttttctggttgttttgtggtcttctcttcctttattcctttttttttttttgagacaagagtctcacaccattgctggggctggagtgcagtggtgcaatctcagctcactgcaacctccgcctcctaggttcaagcaattctcctgcctcagcctccctagtagctgggattacaggtgcccaccaccacacccagctaatttttttgtatttttagtagagacgggttttcaccatgttggccaggctggtcttgaacttctgacctcgtgatttgcctgcctcggcctccccaagtgctgggattacaggcgtgagccaccacgcctggccgcttcttgtctttttgtgaagatgattttctctggtggtatgttttaattcattgctttttattttttatgtatcttgtgtagggttttttgacttgatgttaccatgaggcttgcaaataacgtaatccattattttaaactgatgacaacttaattgccaaaacaaacaagcaaagagaaaactaataaaacctctacactttaacttcatcccccacacttcttaacttttggttatttctatcttattgtattgtgtcttgaaaagatgtagttattttctgatgggttcatctcttggcctttctactcaagatatgaacagtttatacaccacaattacaatgctacaatattctgcgtttttttgtgtgcttactattaccagtgagctttttaccttaagatgatttcttattgctcgttaacatcattttctttcagattgaagaacttccttcagcatttcttataggacatgtctggtgttgatgaaatcccttagcttttgtttgtctggcaatgtctttatttctccttcacttgaaggatattttcacttgatatgctattctaggataaaagttttttccttcagcacttaaaatatgtcatatcactttctcctggcctgtaaggtttccactgagacatatgctgccagatgtgttagagctcctttgtatgttacttgtttcttttctcttgcttcttttaggatcctttatctttgacatttaggaatttggtaattaaatgtctcgaggtagtmttatttcggttaaatctgtaacctctctgtgcttttgaattgtgatattgttgtctaggtttggaaaattctctgttattatccctttgaatcagccttctaccccatctctctctacctccttgttaggttaatgactattagatttgccattttaggactgttttctagatttcgtaggcatgcttcattcttttttatcattttattcttttgtctcttctgactgtattttgaaatagcctgcttcaagcttacgaattatttcttctgcttgatcaattctgctgttgagagactctgacgcattcttcagtatgtcagttgaatttttcaggttcagaatttctgcttgatttttagttatttcaatctcttgttaaatttatccgatagaattctgaattccttttcagtgttatcttgaattttgttgagcttcgtcaaaacagctgtttagaattctctgcctgaaaggtcacatatctctgtcactctgggattgatcatttgtgccttatttagttcatttggggaggtcatgttttcttggatggtcttgatgcttgtggatgtttgttgatgtctgggcattgaagagttaggtatttattgtggtcttttctgtctaggcttgtttgtcctcatccttcttgggaaggctgtccaagtatgcaaaggaattgagtgtcctgatctaagtctttgcttattgcagctgcatctgcattagtggggacccagacccagtaacactgactcttgcagaccggtagaggtactgctttggtggtcttaggtgagatctgagagaattccctggattaccaggcagagactcttgttttcttcccttactttcctgcaaacaaatggagtctctctctctgtgcagagcttcctgcggctgagggagggatgaaacaagtacccatgtgaccaccaccactgggactgcgctggattagacctgaaaccagcatagcactgagtcttacccgggacctgtggcgaccactgcctggctaccactgatgttctctcaaggcccaagagctcttcagtcagcaggtagtgaatccggcctggcttgtatcctcccttcaggacagcgagctctccactggcccaaggtgggtccagaaatgcctgagaaccagggcttggagtcaggaagcttaggattccacttaatgcactgttctgctgtggctgagttggcatccaagctgcaagacaaagttcttaacattcttccctctcctttcttcaagtggtagtctttcctcatgaccaccactgcccaaggcctgtggtgagtactgcctcgccactgctgatgttaacgtaaggtccgagggctcttcagtgagtttgtagtaaatgttgccaggcctgggtctctcccttcaaggcagtgggctcctctttggcccagggtgggtccagaaatgccatccaggagccaaggcctggaatctgggatcctaggagcctgcttggtgctccacaccactgtgacttagctggcaaccaaactgtaagacaaagtccccgttattcttccctttcctttcctcaagcagaaggtgatatgrtttgggtatttgtcacacccaaatctcatgttgagatgttgtattccccagtgttggaggtggggcctggtgggaggtttgtgggtcacaggaatggattcctcgtaccttcgtgctgttcttgagatagtgagtgagttctcatgagatatgattatttaaaagtgtgtggcacctccctctgccccttgctccttctctcgccatatggcctgcaagcacctgcttcaccttctgtcgtgagtaaaagctccctgaggcttccgcagaagccaagcacatgctggtgccataattgtacagccagcagaacagtgaaccaattaaacctcttttctcttttcagacagtctcactgtcacccaggctgaagtgcagtggcatgatctcggttcactgcaacctccatttcccaggttcaagcgattcttgtgcctcagcctccagagtagctgcgattacaggatgtaccaccatgcctggctaatttttgtgtttttagtagagrtggagtttcaccatgttggccagacaggtctcaaactcctggcctcaagtgatccacctgccttggcctcccaaattgctgggattacaggtgtgagccatggcacccagcctaaacttcttttctttgtaaattacccagcctcagatatttatgtatagtaacagaagaacgacctaatacagaaggagtctctccccatagccaccacagctgtgaacatggtgggtcatgcttgaagcctgcatggcactgggtcttacccaaggcctgcagcaagttctacttggctactagcaagtaccggcaagtattacctgctggtgtttgttcaagacccaagggctctttagtcagcaggtaatggatcctgccagaactgtgtccttcccttcaaggcagtgggttcccttctggcccagggtgtgtctagaattgtcatcggggagctaggtcctggaatgggggcctcaggactctgcctggtgctccattctcttgtggatgaactgatatccaagttgcaaggcaaagtcgtctttaccctcccctcttctctcctcacacggaaggaaggagtctctcctagagctgtgagctgtgccacctgggattgggggagtggtgatgcaagcactcccttggctgccccagctggtatctcagctcactgctacctccacctcctaggctcaagcaatccttctacctcagccttcctagtagctgggactataggcacacaccaccatgcctggctaatttttttgtatttttggtagagatgggttttgccatgtttcccaagcttgtctcgaactcctgagctcaagtgatccacccggctctggatcacaggcatgagccaccatgcctggcctggtgtcttactaggtcacrtgcacccaaagtccactggctgcaagcccagcacagcaccgggacttgcctagggattgcagtccttgtggccaagactgcctttcaagtttatttaggaccctagagtgctttagcatgcactggtgggactagccagaactcaggttctcgctgctgggatggatgattttcctctggttaaggctggtataaaagttccttccttgggccccagctgatttctgccctgtgtcgcttcccaccatgattggcaggacagagtttcaatgccaagtcccacaatcactgcgttctcccttccccaagcacacattctctctctgtcatacagctgctgtccagggggttgaggagggtagtgtaggcaattcaaaattgtcttccctaacctcttcagtgccccttttctcaatatgatattaaaaccagatactttggttcttatgaaggtgatttcttgtgtggataattgttcaatttggtgttcctgcaggggagatgattattggttctgtttgttcatcttgctctgcctcctacttcattgattactttcctgacctttatttcacctttgttttcaaaagatgttttagtatggcaaaaagttctacgttgacagtattttactttcagtacttttaagatattttgctgtttgtgagtttccgttgattttgtgagaaatctgtcatcattgtatgttcctttgtccgtaatgccttttcccccagcttcttttaagatttttttctgtttatccttagttttaatcagtttgattatgaattgtcttttggtagctttcttcatgtttcttttttggggggggttcctttgaggttcttggttctatgggtttatagttttcaatgcatttggaaaaaattctgcaattattttactttttctgtcactccacctcttaatttgggaattccaattaaaagttaattaggttgctgaaactgctgcagagctcagttacatgctttttttttggggagggggtctgtttatttgtttcattttagatagttgctattgctttgtcttcacattcttttagcagttttttcttcttgattgtctcatctcttaattctatccagtgtagttcttatcccagtcattatagtttgcatcttatagaagtttgatttggatcttttgtgtccacacacacatgcactccatgcctcatgcctcttcttcacatgttcagcctttctttcttcttcttcttcttcttctttttttttttttgaggcagagtctagctcttttacccaggctggagttgagtggtgtgatctcagctcactgcaacctcccaggctcaagccattgtcccacctcagcctcctgagtagctgggactacaggtgcgcaccaccacacctggttaatttttgtgtttgttatagagacagggtcttggccctgttgcccaggctggtctcgaaatcctgagtgcaagcagttcacctgctttggccttccaaagtgctgggattacaggcatgagccactgtgcctgtccccatgttcagtctttcttatagcttcttgaacatatagaagtcaatgataatggattttgtgccttgcgtgctaattcaagtgtaatttgagggtttgtttcgattgattgactttcctcctttttatagattatgttttccttttttcacgacttttttttttgagacagagtctcgctctgtcacccaggctggagttcagtgacacgatatggctgactgcaacctctgccttctgggctcaagcgattctcctgcttcagcctcccaagtagttgggattacagatgcctgccaccatgctcaactaatttttgtatttttagtagagacagggtttcaccatgttggccaggttggtcttgaactgatctcaagtgatccgcccacctcggcctcccaaagtggtgggattacaggtgtgagccaccacgctcagccagcatttttcaattgaatgctagatatgggaattgtatcggttcctgatatttttgtatttttataaatatttttgaccttttttcttggatgcagttaagttacttggaaatagcctgactttttcagatcttgcttttaagctttactaggtgagactacaggactttatagaattaatttttccattagtgaggcaaaaattcttcgaataccatatctgatgatccattaataataaagttttcaagttagtttcctctaattgttttgggtggggttttccctaccttctgtagtttcctcacacacgtgcaccaatcagtactcaattaaatattcagtgatgactttttgcatgtttaaggagttttctctctgtgcatctctctcctcttgtatgctgccttatgaaattcagccaccttagtctctgtgaactcctagatccatttcctggagttagggaggccactgggctgcccctggatttatcttccctttgccatggcctagacactttccctggacagtaagctgagttcattgtaaggctctcacctagtttgttttccatctcttgatttccagtttcttcagcaatgtgttatatattttgtttggatttaaagttgctttagtcgattgggcaaatttcagcgtctgttccttcatattttggttagaaaacaactcaatatggtattttagtagaaaaagccatgaaaagaaaattacttttaaaccccttgtttctttttattgaaacttatatttttcctaggctcattgaagagaacagttacatttaagtttatttataacatctgtcctcatgtaatttttagagctattaacaaattacaggagaaaatgaaaactattgatgttactagtactcttctgttccaatgaaagcttgatactgctaagtgaatgatacaaaacaagttaatccattactcctcctgattctttgaagtctgaatcaacttatagaggaaatctcctgtgatgtgctgtgctcttcatatataaatttgattgtattttgctgactgctaatattacagatttttttttcaagtcaaattaaaatggttatattctgcagcaagttatttaaattgttcatgtttcaaataacgtctccttccatttcatagaatggtgaaaacatctgtttatgtaattatagtttgctgttgtcaaactggtacagaatttgccttagtctttgagtttattcttcctgctaaaatgcaaacaaggctaatatattccacagttgtatttgttaaaaatctttatatagcaattttcattgttactgatatcaaagacattaagtgggattagtcaaccgtatccattatttgtgagcttgaaagacaagaaagtagttggactctgcatctaattcagagtgtcattttagccatcagtttctgcttctccttatatcaagacttttaaaaagcaaaagttctaatatatggagacatttattattttagttaatttttccacttcaagctgaaaggggctattaattgaacaggcaggcatccaaagacaaatatctaacttgtttttctctgtcttgctttcttgggatttgtagttcatgatggcagactctcatctgttttatttccctgaggatacccagtaactagaaagttcttggcatatagtaagcattaaccacatttttgatgacagtgagtcaatgaatgagtgaatgaacaattaagcttctgagtcttttcccttcttccatatctcatccatctttccaggcctagttcaaagttatactgcatttatgaagtgttttttgaatgaaattttctccaactatttcagttcattatgatttttttttttttttttaagacagagtcttgctctgttgcccagactggagtgaagtggtgtgatcttgggtctctgcagcttccacctcctgggttcaagtgattctcctgcctcagcctcccaagtagttgggattacaggcgcctgccaccatgcctggctaattttttgtatttttagtagagctggggtttcatcatgttggccaggctggtctcaaactcctgacttaggtgatcctctgcctcagcttcccaaactgttgggattacaggyatgagccgccacgctggggccattatgatcttttcattgaactcttggcattttcttgccagtttaagagagaattttctaacaaatataactgcacacagttggagtagacagcaagaaggaaacattctattacttaaagtgtttaaggagtggcaggatggccttgtcrgtaaaagggaggggagtgacaggtatagcgttcttattgtgccaggtacttatgtatttcacgccctttaatttcaaaggccccaaccctacaaggtatagatcaactttgcctattttttagtgtggaaactgaggtttagagaggcctataaaatttgtctacagttccatagccataagcgtctgattgataaagcaaacccaagttctttgtagaagagctgttatactgcctttagtgtgtaactacttcatgaactcagagtccattatgattgtgtaaggtatgacagtttggcatttctaccaagaaatgaaggcttgaatggggcagaatgacagcacttggtggttaggaagagaagaaagttttggataatgggataattagaaacaccgaaagggaaagagaggtaccaaactttatcattctgttcctattttggcctcatgatatgtcaaggtttttgacaacgaagttggtggatcctattttgatttttttagagaaacatttattattggggtttattgctctggtttttgttttatatgatacaagagaaacaacaaaattaagtcttacagtaaaaataagtcctttccccccaactatcttaaaatcttaagataaaaatcttgactggttaaaaccagtcaactaacttcttgtttttagtgaagatcgtgtttgttaataatgcattttttgaacttgtcttttttcatggtttcatatggaacagacataccttagtaaactggcatattatacttttatctggctgctctctggatgatctggtaaaccatcatgttatacagaggttaaagaggtaaagtgagttcatatttttggttgttttattggcagattttctctctgcttttctgtacacttaaaatgtttgcataattaaaaatttttaagaattgcataaccctatttgtatttaatacatgcctttaaacaaatgaaaaaatatattaaactttcgttgtaccaccagatggcgctctctattaatccaaattaagatgcccacaccattttctgaattattttgtgttatgtgtattgttagatttttggcatgaatgtatggtcaaataataatgggatctagaattcacgaataaaagaggaagtagaataaatgagttgctaatgtatagccccaggatatatcaaataagccagtgtttaatatagtttctggaatttaatcattagtcattagaatgatgttagaataaaatttaggattaggaatatagctgttttgtattttgccacatatgtttgtccttccttattctgggtttttctttgatttttatcaatagtttttatgtatcagctgtttttgacattaatggtttctcttgttatatgttagttttatactattagagtaactttattccaattatgatgtactggaatttggattcatgagattttgtcatattttgatcacataagcatggaacatttgagcttgatttgtttaacaaaataaataaacatcatctctgaatatattcacttgtgtccattctttctcttttcatgaatgtgatttattatttcagtaataaaggatgttaatcttaaattggtaatcctaaataaaacttttatattatcctcattaactttttttttagctaaaaggaatggtaggcaaaattgatgtatgttgaaagtcagcctgaaagctattgagagcatgatctgttaattaacataacagtaaaggtcttttactgttgcctttgcgaaaagaaaactaaacacatattttcaaaagcaaactattttggcatttaaaaaagcttgaaaatagacatctgaaacctaatattgttaatgtaacacattttaaacatttatttatttrtttatatttatttttgagacagagtctcactctgtcacccaagctggagtgcagtagtgggatcttagctcactgcaacctccacctcctgtgttcaagtgattctcctgcctcagcctcctgagtagctgggactacaggcgcatgccaccacactagctaattttcatatttttagtagagatggggtttcactatgtctacatgttggccaggctttaaaatttattttttattgcatgtatttaagctgtacagcatgacattttgatacacatatatagtgaaatgatttctacagtcaaacaaatcaacatatccaccactttccatagtcaacatttttggcatggtaggagtacctaaaacctactctttcagcaagttttcagtatattgcagtgtagtaacactgcagtgtataactatagtccttatgctgaacattatatctctagacttagcaatcttacatagctgtaaatttgtaccctttgacctccctcttcctgtttcctctcctttcctgcgcctggtaaccatcattctactctctgtttctgtttacttttctccctagatttcacatatacgtgagattatacaatatttttctttctatatctggcttattttactaaccataatgtcccccagattcatccctgttgtctcaagtggtgggttctccctttttcccccaaggccgaattatattccattgtatgtatacaccataatttctttgttcattcatccgttgatggacaaacacttaggtcatttccatcttaactattgggaaaaaatgctgcaatgaacatgggagtccagatatctctatgaagtgctgatttcatttcctttagggaaatcagaggaattgcttggcctatggtaattttatttttaaatttttgaagaatctgcatactcctttccataatagctgtaccaatttacattcataccwatagtatataagggtttctttttctctacacctttctaacacttgttatctcttgtcttcttgataatagccttcttaacaggtgtgaagtgatattacacagtggtttcgatttgcatttatctgatgactaatgatgttgagtactttctgatatatgtattggctatttttatgccttctttggaaaaatgtctrttcaggtcctttgcccgtttttaagtaagtgtttttttggttttgttttttgctagtaagttttaaaaaaaatttagatattaatttcttaacagagagatggtttgcaaatattttgccccaatctgtaggctgccttttcattttgttgattgtttcctttgcattgcagaagctttttagtttgatgtagtcccacttgtttatttttgcttttgtggcttgagctttcgctgtgatatctagaaaatcagtccagaccagtatgaaggagcttttccctatattttcttctaaggaggtttttgtgtgtgtgtgtgtgtggtataagggtccagtttcattcttttgcattagatatttagttttcccaaccccatttgttgaagagactgtacttccgccattgtgtcttcttggcgggcttgtcaggaattacttgaccatatatgcttggatttatttctggctttctatgctgtttcattagtctgtgtctattttcatgcccataccataaacaatatgcccatattgttttgattactatagctttataatactttttttttcttttgagacaggctctcgctctgttgcccatgctagaatacagtagcacgatcatggctcattgtagccttgacttccttgctcaagtgatcctcccacctgagcctgcgactgcaggtgtgtgccactgtgcctggttaatttttaaattttttgtagagacaggtctgtgttgcccaggctggtttcaagctcctgggcacaagtaatcctcctagctcagtttcccaaagtgttgggattataggtgtgagccactgcacccatcctataatatgatttgaaatcaagaagtgtgatgcctgcaaccttatttttctttcttaagattgttttggctacttggggccttttgtggtttcatacaaattttacagtttttttctttttctgtgaaaaatgtcattggaattgcatttgtttgtatattgttttaggtagcatggacattttaataatataattcttccaattcatgaacacaaggtatctttccatttgtgtcttcaattttttttttaatcagtgttttatagttttcggtgtgtagatctttcattccctggttaaatttattcctaacttcagtctttcattacttaatgatggggataaattctgagatatgagtcattaggtgatttcgtcattgtgggagactcatagagtgtacttacacaaactagctgtctctgtgtctaggctgtcatggtatagcctattgctcctaggcgacaaacctgtacagcctgttactgtactgaatactgtaggcaattgtagcacatagtgtttatatatcaaaacaattaaacctggaaaaggtacagtacaaattgctataaaagataaaaaacaggctgggtgtggtagctcacgcctgtaatcccagcactttggaaggctgaggtgggcggatcatgaggtcaagagatagagaccatcctggccaacatggtgaaaccccatctctactaaaaatacaaaaattagctggacatggtggcatgcacccgtagtcccagctgctcgggaggctgaggcaggagaatcgcttgaacccgagattgcgtaggttgcagtgagccgagattgcgtcactgcacactccagcctggtgacagagcgagactcccatctcaaaaaaaaaaaaaaaaaaaaaaagggtaaacggcatacacatatagggcacttaccatgattggagcttgcagaattggcagttgctctgggtaagtcagtgagtgaatagtgaatgaatgtgaaggtgtaagacattactgtaggctttgtaaacactgtacacttaggctagaataaattgatattaaaaatttcttgataaattaaccttagcttactgtaactttttattatctaaaaacttcaaaaattttttaaacttcttgactcttttgtaataacagtttaagacacacgttgtacagctatacaaggcattttctttatatccttattctataagcttttgtctattattattattgcttttttactttttaagctttttttgttcaaaactaagacacgaacacccatattagcctaggactccacaggttcaggattttcagtatccctctttcaccttcacatcctatcccatggaaggtcttcaagggcaataacacacatggagctgtcatttcctataataataatgctgtcttctggaatacctcctgaagggcctacctgaggctattttacagttaactttttttaataagtagaaggagtacattctaaaataacagtaaaaagtatagtaaatacataaaccagtaccatagtcatttattatcaagtacataattgtgtgtgctatacttttattcagctggcagtgcaataggtttatttacaccagcattatcacagacatgttagtaatttgttgtgctacgatgtcacaataattacaatgtctctaggcaataggaattttttatttccataataatctcatggaactgttactgtaaatgtggtctgtcattgattgaaaggtcattatgcagagcctgactgtattttattccttttgttgtgttttctctttcagatcgatcactattggtataaataaatgcagctgatttttgtatgttgattttgtgttttactttactgaattaatttattagctcttttttttttttttcttttttgagacagagtttcactcttgtcacccaggctggagtgcattggcgcgatctctgctcactgtgacctccgcctcccaggttcaagcgattcttctgccttagcctcctgagtatctgggattacaggcgcctgccaccatgcccggctaatttttgtgtttttagtagagatggggtttcactatgttggccaggctggtctcgaactcctgacctcaggtgatccacctgcctcgtcctctcaaaatgctgggacccgcacctggcctaatatgtatatatttttaatggagtcattagtattttctacataaaggattacgtcatctgcaaatgaggataattttaccttttcctttctgatttggatgctgtttatgtcttttgtaggattgctcttgctaatatttccaattctgtgttcaatagaagtggtgagaatagatatcctttccttgtaccagatcttggaagaaaagctttcagtttctcccccacagattattatgtttgctttgagtttttcataaatggcctttattatgttgaggaagtttccttctatacttattctgtcgaaagtttttattatgaaaagatgtggaacttttgtcaaatgcttttttgttcatttattgagatgatcatgtggcttgtatcattcattctgttaatgaggggtaatcaccttgattgatttgtgtatgttaagccaaccttatatcccagaggaaaatcccacttggtcaaagtgtattatctttttaatgtgttgttgaatttggtttgctggtattttactgaagatttttgaatgtgtgctcatcagagatattggcttacagctttctttccttgtggcatctttgtccagctttggtactaccctgagggtgatactggcttcatactatgagtttggaaatactccctctacttattttttggaaaacttcaagaaggattggtgttaattcttctttgagtgtttggtagaatttagctgtgaagccatctggtcctggatttttctttgttgagaggttattgattacttctttcatctctatttgtaatttgactgttgaggaaattctgtttcttcttgattcagtcttgataggttttatgttcctaggaatttatctgtttcctttaggttattcaatttattggcacctagttgtttataagtagttccttatttttttttattgcttttcttttcttttcttttttctttttttcttttcttttttttttttttgagacagaatctcactctgtcacctaggctggagtgcagtggcacaatcatggttcactgcaacctctgccttccgggttcaagtgattctttcctcagcctcctgagtagctgagattacaggcatgtgccaccacacctggctcattttttgtatttttagtagagatggggtttcaccatgttggtcaggctggtcttgaactcctgacctcaaatgatccacccacctcggcctcccaaagtgctggaattacaggtgtgagccactgcacccatcctgtgatttttttwtatttcagagacatcctttgtaatgcttcctctttcatttctgatttttagtcttctctctctttctcttagactacctgggagtttgtcagttttattttctcaacaaccaactcttagttttgttgattttttttcctgtggtttttctatgctttatttgatttatctgtgtttttttactttctttcttctgctaactttgggttaagtctgttcttattctagctccttgaggtgtatagttaggttgtttattttgagattttttttaatgcagacatttatcactacaaaatttcctcttattactgcttttgctgtatcaygtaagttttggtttgttctctttttgtttttgtttatcctgagatatttaaaaaattctcttttgacttactgtttgacctagtggttgttcaatagtgcgttatttagtatttgtgaattttccatgttcttcttgttatctagttcaattccattgttgttggacaaggtatttgatgatattattttgaacttcttaaatttgtttagacttgttttgtgacctaatgtgatctgtcctggaaaatattttatgtacacttgaaaagaatgtatattcttctgttgagtagaamgttctgyataggcttgtcaagtttatttggtgtgtagtgttgttcaagccccgtttctttattaatttttttgtctggatgtcctatctattgttgaaaatggggtactgaagtcacctactattactgtattgctatcagtttcttctttcagttctgtcagtatttgctttatatacttgggtgctctgatgttgggtgtgtatttgtttacaattgttatatcttcttgttgaattgatccttttgtcattgtgtaatgacctttttttgtctctagagacagtttttgacttacagtgtacttcgatgcaaatatggccactcttttgggtaccatttgcatggactattcttttctattccttcactttccacgtatgtgtgtccttgaatctaaagttagtttcttgtagacaatgtatagttggatcttttttttttaaattcatttagctgctttatctttttattggagagtttagtccatttacatttaaagtaattattgacaaggaaagatttaccgttgctgttttgttaactgttttctgtttgttttgtagttgttttgtcctcctttttctctcctattgtcgtcttgttgctttttgtaatgctgtgattctttgtgtaacttctataggtgttttttttgtagttaccagaaggcttatataaaatatcttgtaattatctgtgttaagctgataacagcttaacttcttttccatgcaggagcactcatttttacctttcttaccctcaaattatatgttattgagttacaatttagatctattgtattatgtatttaagataatttcgttagagttgtttttagtacttttatcttttaggttttgtactgggattataattaacttcacaccactgttatagtaataaaatattctttttattttgccygtatatttaactttactaacaagttttgtactttttttggtataaaaaacaaaaaaaacattatgttgttgttttgcatcttttcatttcaacttgaataactacctttagcatgcttgcaaggcaggaatagtggataaagtaccttggcttttattggtttgagaacacctttatctccccttcagctttaaaggacaggattgctgggtatagtattcttggctgacaatttttttttctttctgcactttgcatatataattctattcccttcagcctgcaaggtttctgctgaaaaatctaataagaaatagagagtcccctgtacttagcaagttgcttctttcttgctgctttcaaaatcctctctgtctttaatttttgacaatttgatgataatgtattgtctctgtgtgggtttctttttttttttttttcctttttttttttggagacatggtcttatagtgttgcccaggctggagtgcagtggtgtgatcatggctcactgtagccttgacctccctaggctcaggacctcctgcctcagtacccctagtttctgggaccacaagcacttgccagcatgcctggctaattttgtattttgtgtggagacagagtttttccatgttgcccaggctggtctcaaactcctgggctcagtccacctgtcttggcctcccaaagtgttgggattatgggcatgagccactgcacctagcctgtgtgggtttctttggattaatcctatttggtatcatttgggctacctgaatctggatttgtattttctttcccaggcatgggaagttttcagccattatgtctttgaatgtgtttttagtccctttctttctctcttctgcaactctgataatgcctatattgtgatggcttcacttaagtcccttaagtcagcagtccccaacttttttggcaccagcgactggtcttgtggaagacagtttttccatggacttgggatggtggagtagggtaggtgggagaggtggagggttttgggatgattcaagtgcattacatttattgtgcactttatttctattttattttattttttatttccataggttttgggggaacaagtggtatttggttacatgagtaagttctttagtggtgatttgtaagattttggtgtgctgtcatcactcgagcactaaacccaatttgtagtattttatccctcacccgctttccacccttttcccccagtccccaaagtccattgtatcattcttaagcctttgaatctttatagcttagctcccacttatgagtgagaacataatgatgtttggttttccattcctgaattacttcacttagaaaaatggtctccaatcccatccaggttgctgagaatgccattaattcattcctttctatggcttagttgtattccatcatacagatacataccacagttatctacttgttgatgggcatttgatccacatttttgcaattgggaattgtgctgctgtaaacatgcatgtattgtgcactttatttctattattattatatactcaccataatgtaaaatcagtgggagccctgagcttgttttcctgcagctatatggtcccatctgggggtgatgggagacagtgacaggcattagattctcataaggagcatgtgccctggatcccttgcatgtgcagttcacaacagagtttgtgcttttatgagaatctgatgccactgcctatctgaggggtggtggagctcagctttgctcacttgcccaccactcacctcctgctgtgtggtcttgttcctaataggccacagaccagtatctgtattggtctgtggcttgggggttggaggctcctgccttaagctgtctttactctttttcattctttgttatttttgcttttcagattggatgatttccagtgacctgtcttggagttcactgatcttttcttctgcttgatctagtctgttactggacccatcttttgactttttggttcagttattatatttttcatttgtataatttctgtttggtgctttcaaaatatgttctgtcactttgttgagttctcagtttgtttatgcattgctctgttgagctcagtgatcatctttatgaccattttttaaaattccttgttgggtaaattgcatatcatcatttccttaggrtcagtttctgaaaatttacctggttcttttatctggaacatatttctctgtttctttattgccctcactcttggtttggcttctgtgcattagataagactactgcctctactagtcttgtgagactggtgttgtgtaggagatgattcttaccagttaggccagccagagtttctaggtacctctaaaatctttttgtttgtccaaactacactctttgttctttcttagtggtctccagtaattagggtgtgccaagttctgccagatgaattagaagctagtttcttgagatgcaggtgggaagattggtgtgttagaagtgtgttgcagttcattctatctttagggagaagctgagagccagagcttatctctcattcattccacactaagctggagagaggatctgtggcagatgcctgcacacttatttaggctgcactgtctctttgttgtccacagttcaggaaaactcacgaataccaagacactcttgctcttagggctaggtgatttaggagccaaatcctctaagagaactgcaaaagttgggtcacttacacgcacggtccaacccttcactccttagttagaagctgggtattggggattccttcttgattgtttggcacagtgcacagggaggggtttgtgtgcaagtgtgtctaaactttttctacctgtttggatgtggatgttttctcagttgccccatgtataggagactgtcggccagtttctggctttctctcagaggaaattgatctgtgtatacatgtttattcagtacttctgtgggaggaagtaaagctacgggcttccttttccatcatcttgctgatgtcactgctaacacattttcagatcacatttttaggtggttttgtttctggttatgccattcaaatagaaccaggagtgtttttaaaaacattacattttactagcatggcatctttaagaattggttctcctttttcctgggtatattctcttagaagattaaatacttgatgatgagaaaataatatattgaatttcaggaagtttatcttatatatctattttagtgttgttcattgggaaaggaaaaagttagatgaattatcacttgccggttttcacagagcagattkttatagaagcaatgactaaaataaaatgactattttattaatattccatcctccccacaagctccacaagctccccttccaatttttttggtgtttttttttccccttccgacttaaaaaattttattgtttactggcaaccaggcatgcacacatgtgtacgtatgcatattaaattaaattttatctaatgggttaatgaatctgagaagcagtgtttggaaccaggaggacattgtagctaatgagatcctgaactggggcagaggtccagctgggatgagggtaaagtcatgaatttgaaaagagaagataaaataatcaagatgtttgcttgattaaatggttaaggataatgaaagaaagagaggagcaagaatgacatttttatttctccccttacatcaccaactaagttgggggaatgtgaaaaagcaatgttggagggaggaagagagagggaagggctgaaaggaaaaatgaattccatcttggacatatttaattggcattatccaagttggttataagaatgcgatgcttggggctgagcatggtggctcatacctataatcccagcactatgggaggccaaggcgggtgaatcacaaggtcaggagttggagaccagcctggccaacatgatccaatcccgtctctgctaaaaatacaaacaattagctgggcgtggtggcgggcacctgwaatcccagctacttgggaggctgaggcaggaaaatcccttgaaccgggaagtagaggttgcagtgagctgagattgtaccacttcactccagcctgggtgacagtgtaagactccatctcaaaaaaaaaaaaaaaaaaaaaaagtgttgcttggagaagggatgaagactagagatatgccacattttcttattttaaaaagtcctttcttgtttttctcatcttgacaagtatctaataattaatgtgtatttttaatgtgtgatttcaccttaaaaagattattataaaaacatttaaaaactattttataacatatataatcagtggaattgcatgactaaagaaatgtagatttttggagttaaaggtttgatatcttatggactctttaacagtagcaggtgaaattagcaaggaaaagtatgggatacagagaaaagtacttgttctatgaaaaatgatttgtagttatagagtgctttcattatatgtactttgtygtttggtattcatagcagttacctgaatgtagtagatggtggtatttgtattttcaaatgaagaaactgatcttcatagtgtggatacagggatacttttttaaaaaattctttttattattattgtcattgaatggttatacacaagtattttcattttttattcatttttacaaatggaagcaagaatgaaatgaaggaaattattaatacagttctctcatccacccttgaatctcccatccagattcaaatggtaacattttaccacacttattctctttgtcctttatatatgtgtacaaacacacccatttcccccctgaacttatagccaaaatgctcctatatccctgaatatttcagcgtttgtctcctgtatyagtcggttttcacgctgctgttaaagacgtacccgagactgggaagaaaaagaggtttaactggacttacagttcatatggtcggggaggccttagaatcatggtgggaggcaaaaggcacttcttacatggtggcagcaagagaaaatgaggaagaagcaaaagtggaaacccctcataaacccatcagatctcatgagacttattaactataatgagaatagcgtgggaaagactagcccccatggttcaattatcttgctctgggtccctcctacaacatgtgggaattctggcagatacaattcaagttgagatttagatggggatgcagccaaaccatatcattctgcccctggtcactcccaaattgtatgtcctcacatttcaagactaatcatgccttcccaacagtcccccagagttgtaactcatttcagcattaaccaaaaagtccacagtccaaattctcatctgagacaaggcaagtcccttttgcctatgagcatgtaaaataaaatcaaaagcaaggtagttacttcccagatacaatgggggtacaggtattgggtaaatatagccattccagatgggagaaattggccaaaacaaaggggttacagggcccatgcaagtccaaaatccagcagagcagtcaaattttaagcctccaaaatgatctccatgagtgcaggtcttgcatcgaggttatgctgattcaagaggtgggttcccatggtcttgggcggctctgcccctgtggttttgcagggtacagcctccttcccggctgctttcatgggctggtgtttagcatctgtggcttttctgggcacatagtgcaggctgttagtggatctaccattctgggatctggaggatggtggccctcttctcacagctccactaggtggtgccccagtagggactctgtgtgggggctctgaccccacatttccctaccacaatgccctagcagaggttctccatgaggaccctgcccctgcagcaaacttgtgcctgggcatccaggcgtttccatacatcttctaaaatctaggaggaggtttccaaacctcagttcttgacatctgtttccctgcaggcttaacaccacatggaagctgccaaggtttggggcttccaccctctgaagccattggctcctttcagccatggctggagcggagaggctgggacacagggcaccaagtccctaggctgcacacagcatggggaccctgggcccggcccatgaaaccactttttcctcctgggcctccgcacctgtgatgggaggggctgctgtgaaggtctctgacatggcctggagacattttccccatggtcacggggattaatatcttgatatcttatgaactcttaacagtagtaggtgaaattagcaagaaaagtttggggttagagagaaaaggacttgttctatgaaaatgatttgtaggcttcttgctacttatgcaaattaggctccttgctacttatgcaaatttctgcagccggcttgaatttctccctagaaaatgggtttttcttttctatcgcatagtcaggctgcaaagttttttccaaacttttatgctctgcttcccttataaaactgaatgcctttaacacaacccaaatcacctcttgaatgctttgctgcttagaaattttttccgccagataccctaaattgtctttctcaagttcaaagttccacaaacctctagggcaggggcaaaatgctgccaatctctatgctaaaacataacaagagtcaccttactccagttcccaacaagttcctcatctccatctgagaccactacagcctggaccttattgtctatatcgctatcagcattttgggcaaagccattcaacaagtctctaggaggttccaaactttcccacattttcttgtcttctgagccttccaaactgtcccatcctctgtctgttccccatttccaaagttgcttccacatttttgggtatcttttcagtaacgccccactctcctggtaccaatttactgtattaatctgttttcatgctgctgataaagacataactgagcctgggaagaaaaagtggtttaattggacttacagttccacatggctggggaggcctcagaatcacggaatcatggtcggaagtgaaaggcacttcttacatggcagcagcaaaagaaaatgaggaagaagcaaaagtgggaacccctgataaacccgtcagatttcgtgagacttattaactataacgaaaatagcatgggaaagaccggcccccatgattcaattaccttgccccggatccctcccacaacacatgggaattctgggagacacaattcaagttgagatttggatgaggacccagccaaagcatatcatctcctaataacaaagactttacatgatcacagtacgtttattaaaatcaggaaattatcattgatatctatagaacttacatttcatcaattgtcacaataatgtcagggacaacaaatttgtcaagctctacaagtactaatgaagggcagtgccacataaataaagcatactgttagattgaaattagagtatttgtaaagaggttgccttctgagataattaatggccatcagcctctgttaatatatttgcctgccctatatcccacaatttgactttgaattttagggagagtagggagtagtagagagcaaattatttttgtttttgccatttgaccctttccagaaacagtagcgcatgcccagaacatcctttggaggaattctagcattgttttcctcacttagctttaatcctttctttcttgtcctcctttcatatttactagcatgtgctaagcactgaattaaaatgatagaactatgtgtatgtactgtgcatagaccagctctgtcagggagaccctaacccagtggtgctagaggaattaaagacacacagacagaaatatagcctgtggagtgggaaatcaggggactcacagccttcagagctgagagccccaaacagagatttatccacatatttattgacagcaagccagtgataaccattgtttctatagattatagattaactaaaagtattccttatgggaaacaaagggatggactctggctagttatctacagcaggaacatgtccttaaggcacagatcgctcatgctattttttgtggtttaagaacgcctttaagcggttttccacgctgggtgggccaggtgttccttgccttcattccggtaaacccacaaccttcagcgtgggcgtcatggccatcacgaacatgtcacagtgctgcagagattttgtttatggccagctttggggccagtttatggccagatttgggggcctatccccagcagtaccgattgtgctgttttatacttagggaataggttgtttgggcagcaaccgcttaaaaacatttctgagtaaacttttattatattttatagggatgtaaaagtggccctttatagactcttttgtttgtttgtttggacccttcttggtatttctttttattttttagagattgggtcttgttatattgctcaggctggagtgcagtggctccagcactgcagccttgaattcctgggctcaagcatcccttctgcctcagcctcccaggtagctgggactataggcacatgccattgcaccaggctttccttggtatttcttaaacatacattaaacatttcttaaggaatccctcaatgtataccttaaatgtgaagaagccatatygttcttcaaggcctttgtgtttattgttccctttaccttaattgtgcttattgttccctttgccttgattactctttccccagatagctgcatggtttgttcccctaactccttcagatcactggtcaaatagaacttccctgaccaaatgatgactacctttccctccccctttctcacctgtactccctatccattttctccataaaattcaccacactgatacactattactttcacatgtttgcttattgtatactgccttccataggagtataagttccatgatggctggagtttatctgtttagtttactactatatccccagagcccttaacagtgtgttgatgtagtagactcttggtaaatctttgtgaggtgaatgcatgtgctgctattctgagtttgaatgtgacagattatttttttcctaaaaaaatagcaattccgagggaattatttaaatactacaacttaggtgctgtctttctgagtaggggagctttaaaataacttattttagaacttttctttcaaaggttttattttctattatgttattggtttgcttggttctacacaattttcttaccaagtatattgaaaaaaaaagattgcaatgagttaaatatcaattcttttgttttttaataaaatgaaaatgttttcttattatttaatgtcagtcttgtttcagacaaattttagaagaattaactatgtccatttttatgggtaatgtttgtacttgctggggtatttraggttttttttttkttgttgttgttgtttttttgttttttttctttttttaagataggaaatgttcctttttttttgaaatggaatttcaatcatgtcacccaggctggagtgcagtgttgtgatcttggctcactgcaacctttgcctcctgggttcaagcaattctcctgcctcagcctcccaagtagctgggactacagacgcctgccacatgctcagctaatttttgtatttttagtagagaaggggtttcatcatgttggccaggctggtcttgaactcctgacctcaggtgatccgcctgcctcggcctcccagagtgctgggattacaggcgtgagccactgcacccggtcaagataggaaatgttctgtgaacttatttttttgagtgatcacaatcacttgccttccattaatgcttcattttaggaaatgattaattaaatagtaygtggaaactttcttctaatcagcaatagtatgtggaaactttcttctaaactcttttgaagtttataaaggttttgcaggaagtctagttgtaaaatgttatacctacatgtcatcttttagcattgccgaggcttctttacaggaaaacatgaacgtgacacagataaccacaggtgactaggtcatagcaaaatatgttagtagctttaagattacttaaaaaggaatattttaaagaacttttttcttaataaaatattatataatgaaatatgtttaatattaagaaactcccaaacatyctattgagtgtatttgctaggagaaaccttttggaaatgtaaaataacttttgtccaaatactatttatgaaacttctatttaaacttttgggttgaaatgtgaaatcttttaaatatggtagtgtctgagtcagtggcttcttagctggcatttctgtgtatttgctcagactccatatcctaaattaaccagtgtttttttttttttttttttttttttttttttttttttttttgagacggagtctcgctctgtcgcccaggctggagtgcagtggcgtgatctcggctcactgcaagctctgcctcccgggttcacattattctcctgcctcagtctcccgagtagctgggactacaggcgcctgctaccacacccggctaattttttgtatttttagtagagacggggtttcaccgtgttaaccaggatggtcttgatctcctgacctcgtgatctacccgcctcggcctccctaagtgctgggattacaggcgtgagggaaaacttgtttttatggcttgtttcctggttttcctggtagttcacaaacatacccgacccatagtatagctgaccatgagcagtgaagggctagtcagtgctcttgcgtaaagaacaaagggcctgtggtatggaaagagaagggtttgttccttgtttcctgcctgatcctggataatattttgacatatgtagtttctctttgagatctttgagtttggtgtgtgtctctttccctgggcatccactactatgatgctgcctcaagaattaacgtttacatctcagttgattttgccctcctcttctgttcctccttgggcaaaattctctaccctttgcagtttccctctccaacaaataaaaccaaaccaaatccaattcttacttctttttatcttgggtattatgaggaaagaaataaagcaaacttataataattttagaaggattgatagttctggagagatgaatagataatttgcatctctaaacctatatcattagcctcaacggaagtgacttagcatttcgaaaagctgacaaagtagagtaaaatcccccagccagtataagggaatttcgtttggaatgatggaattaccatagtaggagacacagtattcacagttgcatttggagatttgcctctgtcatggtctcagctggctctccattttttctttatgttttgagcctaaatttctcaatctttaaaatggagtggtaatattacctactttgcatatttgttaggattaaaccagacagtatatttggaaatatgatgaataatgtcttacttatttagtaagatggtagtttcctctaaaaatgctcccttagcagttttggcagcagtaacccagatggctcaaggtcttagctatcctttgtaagctagagactgcttaaatttttataccagacattgtgctgggtacagaacatacagagatcaataaaatgaagtccctgttctcaaagagatcactgtttctcagaaaagacagataaaacaattaactgtaagtcattgtgataaatgttattttaaaagtgctcttggggcattggagaaggctttatagaataagtcttaaaattaccattagttagcattaaattctttgttcctcatcgtattttctttgtaaaaaatatttaagaaagcttttctgttttgctagttcatcatggtaatcagaaactgaagagaaatttcttctcagaagagcacacagttttatcttatttctcaaatcatgtgaaagctacaaggcaagtgtattgagatctcaataaaattcctgttcattttttagacatgtaatgtcttttacactatttatacttaatagtgatttatcagtcaacctaatttttccactttctgcaggatttccataccttaaaactgtcatttttatctgaaagttagtagtcatgtaatattatacaaattttaggggtgtgtgtgtgtgtgtgtgtgtgtgtgtgtgtgtgtgtagaaatttaaattagcatttaaataaaaagcttagcagtcatcaggtactgcaatgttatattttttggctatatattacagtatagctgaaactcttcaagatggggggggcactgttcattttaccaagaatgtaccttgttctttaccctgtccagactttacctgctgtgtaacttgaggtctttttttgttttttgtttttttttaaagacagcgtctccctctgtcacccaggctggagtgaattggcagggtctcggctcactgcaacctctgccttccagggttcaagcgattctcacacctcagcctcctgagtagctgggactacaggcacgtaccaacacgcccagctaatttttgtgtttttagtagagatggagtttggccatgttggccaggctggtcttgaattcctggccttaagttatctgcccacctaagtctcccaaagtgctgggattacaggygtgagccactgcgcccaacccacataataatcacatcaaatgccactgtctctacaaagcctccattaatattgttggctgacattaatttttacctcttctatgttcctgtgtcatttgtacttattactataaccattatatgattattagagttcaagctccttgaaggcaggatttgtgttttgtcatcttcgtttaatacttcggtcaaaataaacacataatagataactggtgatttaaattggatctagaaaactcaggtttgatgaaaaagtcttttattattctttaacccstcttagaatttgggctctaaaatcagggattgctaaatctattgtgtgttctgtttgctgttaccaacattcaaatgtaattcacactgaccgtgtgcagtgtggctcatacctgtaatcccagcagtttgagaggctgaggcaagtggaatgcttgagcccagaagtttgagaccagcctggacaccatggtgaaaccctgtctctacaaaaaatacaaaaattagctgggcgtggtggtatgtgcctgtagttctagctacttgtgaggctgaggtgggaggatcacttgagcctgggaggcagagatttcagtgagccaagatcttcaccactgcactccagcctgggcaatagagtgagaccctgtctcaaagaaaaaaaaaagtggcttaaacagggtagaagtttatttctccttcacattggtctggacatgaactgtccagtatgggtagagtagttctgtcatcttcaccatggggcttttgtaattggatccaaggttgcaggttcattccttattgtctcctagcaaatggaaaaggggaagaggccaggggaacacaggcccagtgtggttaatggcaaaatatatcatttctgtttacattctacaggagaggctgagaaatgtagtcttcctatcaggacagccrcatttctaggtaaaattcagaagcctttattacttaaaggaagaatgggaaaattgatattaaagatagtgatttttgccataattttcagatttatttccatttttaaaaatagtagatcagttgttcaggaatcaaaacatttgagtatttgactgagtcatcagatctagcagatttttaaaattatacagtcgattcccttactgtaggtgatacagaaggttatataagagccttcctagtgagaactttaccatctactttaggagacagaactaattacaaatgaaaaaagagtagatgcctattgtggcacattctgtgtcacatgctgttatgagtgtagacatttacaggagataaatatttcctataatctaatatagaggaaaacaggaaactgttaaaggtttggagttggaaactgaaatggtgcgagagtgtaaactggtaatggaattcagattgggtgaattatctttctccctcttcttctgataatgaattcagagtggatgagctccctcccttttgctctgcctaatctctgaggttacctaatacttttcagcctcagttaccacatccagatgttctttcttagcccaattactcttgacttctttggaatatttgatactattgaacatcttttttttttccctgtttttgaaaacagcttttctttgaaacgacctcattctctacttttactgcctttcattttctccctaagatttagtactgtgcttttttgctctttttgttcttgatactgcaactctcatcttaaaagaaggtgtgaggctgggcgtgatggctcatgcctgtaatcccagcactttgggaggccgaggcgggcggatcacgaggtcaggagatcaagaccatcctggctaacatggtgaaaccccgtctctactaaaaatacaaaaaattagctgggcgaagtggcgggcgcctgtagtcccagctactcaggaggctgaggcaggagaatggcatgaacctgggaggtggagcttgcagtgagccgagatcacgccactgcactccagcctgggcaacagagcgagactccgtctcaaaaaaaaaaaaaaagaaggttgtgtgtgtgtgtgtgtgtgtgtgtgtgtgtgtgtgkatgtgtgtatgtatccagtttgaactttagtcctatattctaaatcgcctgccagacattttcatcttggtgtatcactatcatttaaagcattcaatggatctcctgcagttttctgactccacgaggaccctcatgctttatatcctaggtgcagaacttgcattttggcctctaccttctcctttgccactgtattttctatgagtaagccctgtcagttcttcctggtgatttcatatttgttcgtttccattcttactgctgccacatttatcagtcccttaattacgttagttatgtgaaagcaaatcaggaagtgtgttgaatgcttgagttaaagattgtggagaatgctctagaaccttgctcttcaaaatgtcatctgtggatggcagcatgggcatcactgggaacttgttagaatgcagaaccttaggagctactctgggggtcacagaattaagagtcttcattttcatgatatttccagttgatgtgcatgcacattagggtttgagagacactgatctagaattcactgtgcatttctgcttcccttctctctcccttctccccctgaccctccttttttttctgactagagtgcggtggtaccaccatagctcaaaggacctttgaactcctgggctcaagctatccttctgcctcagcctcccaagtagttagacctgcaggcactcaccactacgtgtggtgtgtagttttcaatttttattagagaccactgtggtttcactatgttacccaggctggtctcaaaactcctggcctcaagttatcctctcaccttggcttcccgaagtgcagggattataggtgtgagccactgtttctggcccactgcatatctgtttaacctttcttagtttgagacttacttgctaaaaataattaaaccctccagctattgctctgtaactatttaccttaatgtgtaagcttcaaaacagatagataacgttgtaaattgttgtgttagaaatgatgagacagagtggaaagtaactgggggaggcagctctatctagagttgtcacagatgtcccagatgtatgtttgccagtttatagatgtaatttctcaaatttaaaagcaggatatttgaggataagttgcatgtgcataatcttcctcctgtgtaattaaggaatttgggggggcattatttttarttttactatattgtacttactagctttaatgttgttgtgtagagcagtgtcacctttagataaacagcatgtacttaaaacagaaggctatgtttaaaaaaagctttawttttaatttttaattttttgatacagagtctctctctgtcacccaggctggagtacagtggcgggatctcgactcactgcaatctctgcctctgaggttcaagtgattctcttgcctcagcctcctgaggagctggtattacaggcacctgccaccatgcctggctaatttttgtatttttagtagagaccggatttcaccaggttggccaggctgttctcaaactcctgacctcaagtgatccgcctgccttggcctcccaaagtgctgggattacaggcatgagccactgtgtccagctacttgatttttattgatatctcttactatatacatacatttttcataatcaactaatttatagaagtctgttagtaatatgattctgaatatttggcatattttccagatattgcttttatttttccatttttactttattaattttacaagcaatatgtgaaaaaatctgaagcaatttttaaaattattatgaaagaatatattcaaaggtatgaagacttgtacagctaagacttgtattcttgtattcatatgtgagttttttggcagtgtttttcagaactttttgaccatgaactgaagaactaacattttgtagcacacctcagttcatatatgcgtattatatgttactgaaacaaaagtttatattcttgccatacagcttagcaattgagtgctactattgctctccaagcccacagtgaacttttccctgatcacatcctctttccttaccaccagttacctgcctcagtttcacgaaatttgtagatacatttaattaatatgcagtatgctattattttacatatttttcaatttatgtaaatggtttcacactgtatatattcatctgtgaccttttttaatgtcagtgttatatttgagatttagccatgttgatgcaacgctttttgaagcagtccttgtttccccttcttgccaacaattagtagttaaaaatttttttttccagaatgttgggtgcaaaatggaagtaactgtagagttaaagagcactttcactaattaccagtgagactgtgcatattttcatgcttattggccataaatttcttctgtgaattattcattcatatctttttgcttatttcccattgggctggttgtctttttcttattaatttctacatttaatttttgaaatgtctttgattttttatttgttgttaatcttgtgcatatcttatgcatttaataaagaaattatttttacagtagggtattattactattcctgattcaaatatgctaagtgaagaagctgtttatataaattagttttaaaatcttagagtggaggggaagtttctaggaaagcaaaatgagtaaaatcaataaggttcttaaagattgccaagacacatgtcttcttagcagactgccgccagtaccatttgaaaatttgagcatgtgacttctgtaagcttccattataattatataaaaccgagaatgcttctaatatgctgttatgtttatttttgtttttaacatttgcttttttttgtggtttcttcttctaaattaggtcctcgatgggcttcctggaatattggtgtgtttatttgcatcagatgtgctggaattcatagaaatcttggggttcatatatccagggtcaaatcagtcaacctagaccaatggacagcagaacagatacaggtaaacatgacgttaccaagaaattatttaaaatatttaaaatgatttaaaaatatttaacccttcttgcatctaaggattaacattgaaaagtagttttgtatgttgaaatggcatatgccacgtataaaattggaatatttgaattttcagttcacagatgtttatttcattttgtgtctatagtaaagtcmgtttttaatctatactttctaaaatgttgattttaaagtgtttttaaagtatcatttctcttgttrataaaatttgccagtataattccatagtttgttttatttttttttcagtggagggagcctgggtaaagataaaataaaaaaccacctgtagcctaaaaatggacttgagtaatttcctttctgttctgaggtgttcttagttttcagacaaggcccagaagttgtaagacaacccagtgaacaaatgttcttatgaccaacctaaacttacttatgagtggtttaactctgctagaggtagatttgtagttttaaaagtttgccattttcccaatgtgacagtcttaaattctcaaaatcttactttttatctttaaggttggccactattgtaaaaatgagtacttctactggtcttattatgtaattcacagtgaagttacaccacttatttatgcccttttgaaattacttttaagtcactatgaagtgctaaatacataaatatatgtggttgagactcagtgatacatctcagaatcttaacccaatagtttacatgaatggggtgaagtaaaggtagaaaaacagaatggagatcttcaggctataaagtcaagcataatttatttggttccatcttaaattagtttttgagcttttcgctggctagagcataaagggaaatgcaatcttttatgtactttcaagatccttgaggagaaaacatactagttatatcaaagaagcagagctttttaaacacttcctgtaaggcagtgttcttagtatctctgtagaatatggtaacagatgtcatgatgttgtaagtctttttttgtttgtttgagacagggtcttgctatgttgcccaggctggtctcaaactcttggactcaagcgattctcccatgtcagccttccaagtagctgtgactataggcatgcaccaccatgcccagctgatgttgtaactctttttcaagaaacgtgtgaggtgtagcttgacagtataacttggtgtttgtaatgggttatggaggtacaaagcattcacgaccgaagtatcctgcttttttaatggcttatttcaaactaaggataaaacacgagatccttcaacagttcagttrttcagaaatatttttctcaattaggttgttgagaggaaatgaatagcaaattatttgagatgggcagctgtatagcttagagtagaattttgtaatcagagggctgcagttcactggttttctttggcataggttacaagtacatggcaatatattggatttttttttttttacaatgtaaggattttaaaaacagttattaaataataatatttgaaattgtatttgaacattatttgattgcatttgccaacttcttgataggaattgctctgtctggcccccctcccctgctcttcccatctttttttttttgagacggagtctcactcatgctgttgctcaggctggagtgcagtggtgtgatgtctgctcactgcagcgtttgtctcctgggttcaagcgattctcctgcctcagcctcccaagtagctgggattacaggtgcgtgccaccatgtgttgctaatttttgtatttttattagaggtggggttttgccatgttggccaggctggtctcgaactcctgacctcaagtgatctgcccaccttggccccccaaagtgctgggactacaggcatgagccactggacccggtctcctgtgtttctttttaaaaaattgaggtaggaaatcctggtcggggtagccatggcagcttgtgtctgccacctgcccttggccatcacactgatgcaccgggtcccgtgctggccacagcctgctgctcagcatcgcctgtgctctgtggggactctgatgaggctggggctttgcagctggctccacagcgggctttggtgcttgcgcacgtgctgggtagaagttacacagtcgtgctgtcagtatagtgacttgccccctttgatgttagagggaatcgaagactgtcttctttatatcttgaaaccctgtgacaggattgacccagagaagctctcagtgaattcttactttatgaaagacctgtgcttggacagtttggaccaagtagagagtaagcatggtcatggaagataaatttgggtttgaaattcctggtatagatatggaaaagttaatatgtccacaagaaattgtagattatattgcagataagagagatgtatatgaataaaatatcagacccttttgcttcactgggagaagactcagatgatactggtgagtgtctggaagtgagaatgcattttggcattattgctgactttggcagagtaattctgttagacctgggtttaaattgtgtaattgttttactctgaaaataaacgtataaaaccaaaaaaagaaaaaacttgacttataattacagagagaacagttcacagatctcatttagttttatgagtcttggcaaatgtctgtatgatgtcaccaataccccagtgaagatagagcatttctgtcacactagaaagttccttcatgccaatttccagtcaagtcccccaggggcatacactacactgatttctatcccattgggttagttttgctatacattaaaatgtctgtctttttggaggctgttcctattaactttgacgtttaattcagatgggcaaaagtgatgatcacaatgtgatataatgttccatattcatatgatattttataataatttctttgatataaaaagtgcttgaggccaggagcggtggctcactcctgtaatcccagaactttgggtggccaaagtgggcagatccgagagtttgagaccagcctggccaacattacgaagccccgtctctactaaaaatacgaaaattagcagggtgtggtaacacacacccgtagtcccagctactctggaaagtgaggtgggagaatcacttgagcctggcaggtggagcttgcagtaagccaagatcctgccactgcactccgccatgagttatagagtgagactcagcctaaaaaagaagtacttgggaggtatttatttatggaactaagagaaatacttttactgtacatagttacatagttataccctttgtctttccctgcaacatttcataattgtgtttctaattttcaaagatgatactgttttggctagctctatttttttaaaaataccttttattagtaaatatggaaacatgatttaatctttgagcccagtcaagctgttaaataaaaatgttctttgtgtgtgtgtgtgtgtataattctgtaaaatgtaaatactaagtttttcctcaaggttacttataaactgatattatatgtaccatatttttatctgttatttatgtatatgttatgtgtttcagtttttagagcacaacatgtacagctgttagaattgctgtatgcttatttttaaaagaaaatagttgttacccaaaacttactttgatttttaataacatagaaataaagttactcactgtaaaaaagtcttaaaagttcttttaatgtggttcatggtcagattaattgtgtttggtcttgggtttattgtcacgtacttctcaaatttttggaaaggaccaagttttttatacttttataaatactatagcttccttcccctccccccacccaagatattatacatttgggtggagtaaagaatggaataccagaattaactgttgttttatagcagtatcaaacaaatccctgtatatgccatatggatacaggaaacaaggatttatgaaattgtttcagtatggaaatttggtctatagtgatagttattaatgtttagcatttgtaaatattaagattagtagatgtctttattctacttgcagcttgacaaactaaaattgaaataatgagctgtttggaaagaaagttaatgtcattgttccagttactcttaaaaacttgtatattctatggttcttactcctttctcccttttacttctgtgttcttaattcttttcttgcttctgctgctttctagtttcatttctccgacaagtccaaggctttgccttatttctgatgttctcatcagtgtcacatctccatttgttttacacagtgcattcagagtaattttcstagaacattgctttggttattttacttccatcctaagaaatttgcattgattcttctgtgagactcataaaactttttattttcattaaactggtcttcatgttcctctgccttctggcttcatcatttgtctttgaccttacttcagatgctttacaacaaatagctttggctgtaccagacagttctttctgctgaaacaatctgatagtgtgttcttttgttttgttttggttgtgctattgtccttgttggaaatgtattttttgtttgttgtttttgtgatggaattttgctctgtcacctaggctggagtgcagtggcacaatctcatctcactgcaaccttcacctcctgggttcaagtgattctcctgcctcagcctcccaagtagctgggactacaggcatgagccaccatgcctggctaaatttttttttgtatttttagtagagacagggtttcgtcatgttggcccggctggtctcagcgtcctgacctcaggtgatccacctgccttggcctcccaaagtgctggaattactggcatgaaccaccgtgcttggccggaaatgtattttgcatattccttgtggcaaaccagatccttcctattctttaaagcccagcttaaatctctactttaataaaagattcttctgtatgtagtatgtgctcaattatctatggcaagtaccatatattgttacctttgcttatatctaactaaattgtaagtttccagcagttagaacatttatcatatgtgtctttgtagtgctgtggtggcttccactatgctaggaacacagtatgcacttgattttttaatggcatgctgaatcagtctttggtttgattaaattctgtgagataacgcttattatccttagcgatgaatggggaatggagaaaaaagaatcatgcactccccttccccatttagcctgtatttttatatagtctctttttgtttcttgatctctgtccttttcacctcatgttcctgtttcgctttaaaattccaaaaatacagcagccttagggagggtaacttgagctagcatatgaaaattccaacggtaatatatgcaggtactagaaaggcagtatttttcaataattaaaactgtccagaagtgaaatcgattgccttggaagataggttggtttactcttaactggaatggtttgtaaagaggcgggacaaccacctggaatcgtgtggctgggatttaagcattcactaggtagatgaggagtagtttagatgactctgaagtttcttccattcttgagaatgttttagttgtatagtcagtcttctttagttaccatagcagttccaaaaacattttcatttcttgtctttgcataaaaattatatcatggttagtgatggtgattcagcttttaccaaaagtgaaattcaacctcagaggataaaaaatgttggcactctcacataagtcaaaagagtgtgaaaagattctcaggttaaatctgtaagacagatttttttttctgaatctggaaggaatgtttttgaacacacttgctgtttatattttctattaagaaaaaaaaaaaaaaaccagtggatacaggtttctattgtaacctagttattcctagaaaaacctatgagctaactgggtagtctttaacttaacttagcaatacctatgtcatagtattgacttgcttgtcttaatttaaacttttgatctttcctagaaaaaatttcttatggaaggcaaaatcaggggttttcatcagtcttcataagtaagctttgctgtattctgtggcctcaacttgaattcttagtcaggccaaatacagagtgaacaggcaaaagagtattgataggtaacataaatattttacggtagcttaaaaaacaactaaaactacaggcactacttatgttagtggtcatgttgtcccaatattcagtgttaaattgagatgtttaggattataagaggagatgaaagtggctaagtacattaaagaagttttctgctctttcactctgacatagttatttcaagtaaagttggaataaattttgttatttagaaggacattaatttttcaaataaaatgacttacagttgattaaagtacaatatttgtgtggtacctctgctatctttaaaaaataaaaatctggaactggagagaacctagaatattgataggcagtcaaaatttaaattttacatgagatgtgcaagtttgttttacttagagcggattccaagaatgtattgctttgatccttcctcctgggtgctgtcttagatattggtgagtaattagattatcagtttattgcaaaaaagttttcatgacactattttttaagtctgtggatgaaggtgagataagcatagtattttccatgtgagttctgcagaagagaaacataaataaaatatataattaaaatcaattttacctgttttaatttttttaaatgaggctaatagagatttaaaatgatataactggctcactttatcttttgttgcacagcagttgtatagatgtatcaatttttatgcatacactagtacccactgcagatttcctttgctcggtgtttgataaatcttctgtgcttatgtgtttaactatatatttaaatataaagtgagtttcttttagaccaaaaatacctacatatggtatgcttcttcagtatgtagttttatatctttttttgtttcagtgaagttttttgagttacagtttatttttgaactacagtttatttttaatattctcttgctttagttttcttcttcagtgactcctcttacctgtatgttggatctttattacctaatggcaatatttatcatttgcttttggatcctttttgttacttttttaaattacatttttttccgtctgcctttccatttttcttagactattatttgttgtctacggttcattttgtttcatgtttatttctgaaatgttttttcttttatttccaattttttcttgattctgtcattttaattctgaatatttcttattttaaaatttcaaatttggttgttctgtttttccatgtctttaattttatatgttttttcatcacatacatgtcttttagctagttctgaagtagtaggttacagttttaatctgttttttgggaaaagttttctagatgtgtcttcattgtagagctattattcttactccttttaatattaactttatatgagattttaccttgattctttctgctgatcatttttatgcaatattaattttcctttacttttaggaggaagtcctattcaagatagcttttttaacttcacatacctccctcttccgttgttttcatgtaatgtttaaaaacaaggccatggctggaggcggtggctcatgcctataatcccagcaatttgggaggccaaggtgggtggatcacctgaggtcaggagttcgaaccagcctggccaatatggcaaaatgccgtctctactgaaaatagaaaaattagctgggcatagggcatgtgcctgtagtcccagctacttgggagactccatctcaaaaaaaaaaaaacaaaaaaaaaacccaaggccatttgttgagatgttcttgttctgttccctttttgcacttttatctggaccatctccttttgtattatctctgttatacctgtcctgctcaattttgagtcaattcccaggttttttctttttctcagtttggggtcctatcctggaagagaaacttcatggtcagatatgagagtttgtaggggctagactgtctctccccattccaagcttattgtggcccattcacacttaattgttattggactgtgtattagtgtgttttcacactgctaataaagacatacctgagactgggtaatttctaaagaaaaagaggtttaatggactcacagttccatgtggctggggaggcctcaaatcatggcagaaggtgaaaggcacatcttacattgcagcagacaagaatgggagctaagtgaaaggggtttccccttataaaaccattgactctcatgagacttactcactaccaagagaacagtaaggggaaaaccgcccccatgattcaattatttcccactgggtctctcccacaacacatgggaattatgggagctacaattcaagatgaaatttgcgtggggacacagccaaaccataccattccacccttggcccctcccaaatctcatgcccttaccttgcaaaaccaatcatgccttcccagcaggcccccaaagtcttaactcatttcagcattaactcaaaagtccatagtccaaagtctcatccaagacaaggcaagtcccttccacctatgagcctgtaaaatcaaaagcaaggtagttacttcctagatacagtgggaatacaggcattgggtaaatacagctgttccaaatggagaaattggccaaaatgaaggagccacaggccccatgcaagtcggaaatccagcaggtcagtcaaatcttaaagctcgaaaattatctcctttgactctgtgtctcacatgcaggccacactgatgcaagaggtgggttcctatggccttgggcagctccacccctatggctttgcccctgtgtctttgcagggtatagcctccctcctggctgatttcatgggctggtattgagtgcctgtggcttttccaggtacatggtgcaagctgttgctggatctaccattctgaggtctggaggatggtgaccctcttctcgtagataactaggcagtgccccagtggggactctgtgtgggggcttgcatgacacatttcctttccatgctgccctagcagaggttctccatgagggccccacccctgcaacaaacttctgtttggacatccaggtatttccrtatatcctctgaaatctaggcggaggttcccaaaagtcaattcttgacttctgtgcacctgcaggctcaacaccacagggaagctgccaacccttggggcttacaccctctggagccatggtctgagctatacattggccccttttagccgcagctggagcagctgggatgcagggtaccaagtccctaggctgcacacagcagggggccctggccctggcccacaaaagcatttcttccttctaggcccctaagcctgtgataggaggggctgccaggaaggtctctgacatgccctgaggacattttccccattgtcttgttaattaacatttgactcctcattacttacgcagatttctgcaaccgggttgaatttctcctcagaaaatgagtttttctttcctatcgcatcatcagactgcaaattttccaaacttttargctccgtttcccctttaaaattgaatggttttaacagcacccaagtcacctcttgaatgctttgctgcttaggcatttcttctgccagataccctaagtcatctccttcaagttcaaagatttacaaatctctagggcaggggcaaaatgcagccagtctctttcctaaaacatagcaagagtcacctttactccggttcccaacaagttcctcatctccatctgagaccacatcagccttggtttcatcatccatatcattatcagcattttggtcaaagctagtcagcaagtctctaggaagctccaaatgttcccacattttcctgtcttcttctgagccctccaaactgttccagcctctgcctgttccccagttccaaagtcacttccacatttttggtatctttacagcagtgccccactcccggtaccagtttactgtattagtctgttttcatgctgctgataaagacatacccaagactggagtaatttataaagaaaaagaggttttaatggactcacagtttcacatgcctggggaggcctcacaatcatggcagaaggtgaaaggcacgtctcacatggcggcagacaatagagaatgagagccaagtgaaagaggtttcctcttataaaaccatcaggtcttgtgagacatatttatgaccacgagaacagtaaggggaaaaccgcccccatgattcagttatctccaactgggtctctcccacaacgcctgagaattatgggagctacaattcaagatgagatttgggtggtgacagaaccaaaccatatcagactggggaaaaatccttttcaacttcctgtgcttttctcagattggttcattgtgatttccagtttatatatctcttgaatgttttggtatttttttctcagatccattggactccccattagttgcaggccatcaggcaggtctagtggtcattgtagtggtttgtttctggcaggtctagtggtcattgtagtggtttgtttctacctgatggcattttgaagtttgtggggataatcagttagttagttttgttgtaactatcatctattggtttttagtttttctacctatgcctttctgttttctcttttctggggagattctgggaacttagaaaattatttctgctgttaaagaatttttatgataagcaacatttcatagaataaaattttagttaaaggtaatttggagaactctgtgttagaatattatttaatctcttaggggtttggcccttggataaattttcatagtgtcttgtagaaccaggcacgtaataagctttcagtaaacaattcttggtatacatttattcaagaaaaccataggccaaaaagccttttttcttattttgtggaaggatttctcattataatttgatcaagctaacaacatttctcaaattagggcctcaggtatatgcttaactttttaagttaattgagattcagttgatgctgaacccttgctagaatcattaaatgcatcttcaaagaagagcagagaatgggagcagcctatagcattgggttattgtattgcctgcatgtgaagattgaggtaaagaaagaaagtggtactgtctataacaaaatttaatctgtgaagtttaataagagatttgcattttaagcaatccatttggaaaaaagtatataaatttttaatttgaatgtgcaagattatgccctatattttctttttcctcttgatttgttaaaaatttttaaggttaaactttaaataaggtcagtaatactaatagtttttttggaaatggcatattttagaattttctgttacatgtaggtgattatcactatgtcaaaggagtgaacaaaattgttaagatgttacttagtggaggattttcatttaactcctaattctttttttttttttgttatacttcaagttctagggtacatgtgcacaacatgcaggtttgttacacaggtatacatgtgccacgttggtttgctgcaacccatcaactcgtaatttacattaggtatttctcctaatgctaaccctcccccagccccacacccccgataggccccggtgtgtgatgttccccacmctgtgtccaggtgatctcattgttcaattcccacctatgagtgagaacatatggtgtttggttttgtatccttgtgatagtttgctgagaatgatggtgtccagcttcatccatgacctacaaaggacatgaactcatccatttttatggctgcatagtattccatggtgtacatatgccatgttttcttaatccagtctatcattgatggacatttgggttggttccaagtctttgttattgtgaatagtgctgcagtaaacatatgtgtgcatgtgtctttatagtagcatgatttataatcctttgggtatatacccagtaatgggatggctgggtcaaatggcatttctagttctagatccttggggaattgccacactgtcttccacaatggttgaactaatttacagtcccaccaacagtgtaaaagtgtttctgtttctccacatcctctccagcacctgttgtttcctgactttttaatgattgccattctaactggtgtgagatggtatctcattgtggttttgatttgcatttgtctgatgaccagtgataatgagcattttttcatgtgtctgttggctgcataaatatcttcttttgaaaagtgtctgttcatatcctttgtccactttttgatggggttgtttgttttttccttgtaaatttgtttgagttctttgtagattctggatattagccctttgtcagatgggtagattgcagaaattttctcccgttctgtaggttgcctgttcactctgatggtagtttcttttgctgtgcagaagctctttagtttaattagatcccatttatcaattttggcttttgttgccattgcttttggtgttttagtcatgaagtccttgcccatgcctatgtcttgaatggtattgcctacgttttcttatagggtttttatggttttaggtctaacatgtaagtctttaatccatcttgaattaatttttgtataaggtataaggaagggatccagtttcagctttctacatatggctagccagttttcccagcaccatttattaaatagggaatcctttccccatttcttgtttttgtcaggtttatcaaatatcagatggttgtagatgtgtggtgttatttctgaggcttctgttctgttccattggtctatctctctgttttggtaccagtaccatgctgttttggttactgtagccttgtagtatagtttgaagtcaggtagtgtgatgcctccagctttgttctttttgcttaggattgtcttggcaatgtgggctcttttttggttccatatgaactttaaagtagttttttccaattctgtgaagaaagtcattggtagcttgatggggatggcactgaatctataaattaccttgggcagtatggccattttcacgatactgattcttcctatccatgagcatggaatgttcttccatttgtttatgtcctcttttatttcgttgagcagtggtttgtaggtctccatgaagaggtccttcacatcccttgtaagttggattcccaggtattttattctctttgtagcattgtgaatgggagttcactcatgatttggctctctgtttgtctattattggtgtataagaatgcttgtgatttttgcacatgattttgtatcctgagactttgctgaagttgcttatcatcttaaggagattttgggctgagacgatggggttttctaaatatacaatcatgtcatctgcaaatggggacagtttgacttccttttttcctaattgaataccctttatttctttctcttgcctgattgccctggccagaacttccaacactatgttgaataggagtggtgagagagggcatccttgtcttgtgccagttttcacagggaatgcttctaggttttgcccattcagtatgatattggctgtgggtttgtcataaatagctcttattattttgagatacattccatcaatacctagtttattgagagtttttagcatgaaggctgttgaattttgtcaaaggccttttctgcatctgttgagataatcatgtggtttttgtcattggttctgtttgtgtgatggattacgtttattgatttgcttatgttgaaccagccttgcatcccagggttgaagctgactgtatcctggtggataagctttttgatgtgctgccggattcggttttccagtatcttattgaggatttttgcatcgatgttcatcagggatattggtctaaaattctctttttttgttgtgtctctgccagactttagtatcaggatgatgttggcctggtaaaatgagttaggggcgattccttctttttctattgattggaatagtttcagaaggaatggtaccagctcctctttgtacctctggtagaatttagctgtgaatccatctggtcctggattttttttggttgataggctattaattattgcctcaatttcagaggctgatttaagtctaaattctaaactgcctaatttaggtagaactgagagagaataaataataagttatttggagataggggcttaagtccccctatagagtacaggaagttgttaggtggtgttgaaagaatacatgtatgtatcagtcatctagaaacataattattaattttattgcacataatattttagaggtgtattcactttcctgctttgtgtgaatataatggtagaagatagcattcatagttaaaatactggcctgggactgtagaactgggttctgcttctggctctattaactaaatggtgggtgatcttcagtacttgaagaaagtggcttttaaaaaatattgtattatctggtcatatggtaagttttaatattttttaaatgtatcactattatttgtatagtaacctttatttgtttaccaatcactgaacgcataccacaatgtgctgagggcctttcaggtagaaaggtggaagaaagcatgtcgtgtttgagaaagtagtgttctgtgaccagagtgctaggtgcagttatatgtgtcagaggaggtaaaggtgaaggttacagccagtgactggtttggtgctgatcttatgagtgatagtagggagagagtagggagctcttaaaatattcctgcaatagcctaggcaatagatgactagatcctgaattaatgtaatggcagtggacttgataaacaggagatgcctacaaagaatatattgaggagtcagaataaccaagacttttggcagaagaggggagagtccaggatgattcctgagctgggccttaagcacctagagtgaaagtgatggtttattcctggactttaagtggtatggatattatagtaagtagagatgacagaagagtgtaatgtgaagcttttccaattttgtcataacaatgtttaattgcattgcttacaaaaaagaatacattctctccgtttgtagtaattagcaaatgctgcaacagataaatcaatatctgagaatatctagaaattgtgaaaagtatgaaaactgctacctctaattccacatcatcattaaaaaatttgaattgtgtggtttattctttaaaaaaataattaaaacagagaacagcttcccctaaaaaacaagtttatgaaactgaaggaatggactctgtattaaatatttccaaagagttcctgagaccaaaaacggtggcccttcttttccagcagctggaatccaaaagatcttgaaaccagtcctgaaaggcttgctcctatgcaagaaatcctggtgaattttgagaggaagatagagaaatttctcgaaaatttcaagtggtagtagaggtgagttactgccatgaagaatttatccagggactaaaaatattcatttttctttataaaagtttttaaaaatatgtatatttagctggaaataagattttcagttgaaaatcctagtctttgtgttttaaagcttttaatgaatagaaaataatagagcaagtagtttcccccctcccacacaaatacattaaaaatttaagaaagttttaatcatcagcaacaatgatgtttctataagatgatgatactggaaaaatgcatggtaaataaatgccatatttatgctttgaatgtattttgagtgtaagatctgcttggatgagattttttaaaatatatattcatgatctttttgatttatgagaagacttttttctccttagtaaaggaggaagtctcctttttctgattcaagtgctgcttggataccctactgaagctccctctagatagtattttacttagaaacaatgcaggattactatagccccttctaattattttatttagttgttgggaatagaaaatatgtggacatggtacaaactttaaaggggacaaaagtgcagtgaatattctccctcccacttctgtctctgtcattcagttgccctccatagaagtaaccatatttatcagttttttgtatatttttcctcacatattttatgcatatatatatatatacacagacttatagttggcatacatttttatatccttacaaaaatcttttgacccataggtaggactcttctttctctcaatcagttcctcagaaaatggagtagaagaaaattggcatattagtgtgttctcacactgctataaaaataccacctgagactgggtaatttataaggaaaggaggtttaattgactcggttcctcatggctgggaggccccaggaaacttataattatggcggaaggcgaggggaaagcaaggcacatcttatatggcagcaggagagagagaagcgtgcaggggaaactgccatttttaaaaccatcagatctcatgagaactccctcactatcgtgagaacagcatgggggaacagatccccatgattcaatcacctcccaccaagtcccttcccaacacctgacgtgtgggtattacgagatgagatctgggtggggacacgaagccaaaccatatcaattgggtagaaaactattttaaatagttattagattaattttcttcctccagattaaaacataggcatgtggcatccttctgttaaacattgatatttaagatttgactattttaacattttgcagttttgccattgggaatttagaagatgtaattgcaacttaattgtaacctaatcatttgcaatatctgcttctctatttttcccccacttacctcatttaaaaaaaaaamaacaaccagtaaacctcaaaggacaagtcagtacacatatacaaatttgtgaaaactatgcagatagcttcctgaaacaatacgttagaatgaattttagttttactattaatggctgttgttcaggtacttcttagcatctgagggacaaagtacaggggtaagaagaagatactgagaaaaagggagatgtataaagaaggaaagtccaagaagccacatttatgaggcttagccactgagcatggaatggactgtatttggctttagttggcctaggacaagtagaagccataccttgaagtagattattcacttagagacctctggtttccaagattttggaagattaaaacaaaatatttgacaagtcttcttttcaggggaatgcattattaatttggaatttcaggtggtatgtcatttattttgcctcttattatatttaattattgtttcctgatcctgacagtgacgtaaacttgggcacactttgttttatctgttcctactctttatcttcacatatttatttcaaggttctgttttcagtaaagctgttatgtgctgcttaattgccatttgtcactggagatgccctgttgacataaaacagtgattttttaaaaaaatatttacagtactgttaaaaatgaatgaaatctcctattacatttgcttgcttactcattgattctacctactttctttttatctattcccatgtttagttatacgtgttattttttgtatgttttagtttcttaaattagacaaatgtgataagcaaatgtcatttaaaattttaaattgacagccccaattctcttcagtctctgtaaaatataaatgacttaaaattgttttagaataggggttttgctgttttaatgctaaaactgtgattgggtaaaatgttttgtacttaggaagtttcacaaatagaaatgtttcatatacattagattgcagtgacagtatgttgggcagtagatgaatttcagcaattcaaaaagtattttaaaatattgacttccaagtgatgtgatgctttgggctggtgatgttgtatgtactagattatgtggggaaactaaaaacacatcgattatggattgatgagggcaaaatacttttaatagtaaggtttaggattcttcaatggtttattacaccatttccaggtgaagcctgcctttgtaattataagggtggtaagtttggatgaagatgagtcaactaaaaaagtgcagtacaaaattcatctttctgggaacatacgttaaatgagaacaggctgaatttaatgggaaaagtcaataacagtagtttaaaaatatgttcaattggcagggtgcggtggctcatacctgtaatcccagcactttgggaggcccaggcgggcagatcatctgaggtcaggagtttgagaccagcccggccaacatggtgaaacctcgtctctactaagaatataaaacttagctgggcatggtggcacgcatctgtactcgcagctacttgggaggctgaggcaggagaatcacttgaacctgggagatggaggttgcagtgagccaagattgtgccactgcactcaagcctgggtgacagagtgagactccgtcttacaaaaaataaataaaaataaaaatacgttcagtctactggcagaagtacatgttcacttattcctcaatatgttaatatatttttcttaaagtaaacatgaatgttgagtttgtattcaatagattcttacaatcatttcttactttgtcaagaatatcaatacattttctcctcacttgcttgacttgttttttaaatcttcattttgagatgaagtatagtttaatgagtaaataaatgtctacttaaaaatatttaaaaaataaatttaatagaaactttaacttaagtagttcagagtcctcccctttcttttttcatacttgaagtgtgagataaagagaaaaaaaaatactgacagggaatgatgtgacttctctaaagccaaagaattttcaaaattactaagatctttgaatttttagtgatttatttgatagcctcacaattatccctcctgtagaagtgaaagcaagtttagaaaatttaagtgtttcaaaatgatgctaagtactaagtattaaaatagtacttagggtccgtcttgattcataggaactagatggtagaggttcagatagctagtttattaccaataatttaaaaaatagaacttagtttttcttttagacaaaagtacatgtcayttatcccctccacaccccctgtttttttgcaaccagtctgcttgacgtagctttggaaaactgaataattaattgccaaagaataagcagaagcatttttggtgagagaacctaaaagaaaaggaataatgttttaacaacaggaatgatgttttaataatagaggtaacacttatagcatcttctgtcttgtcgtaaaattttctagatacttattttgactagctgctgcatggtgatatggattgggagtgaaggaactgaaycttagtgtcagccgtgtcactaatgcattatattaaccagtagaaaaatcatacaacctctttgtgcctcagtttcctstctgtaaagtgaaaaccaggcctctaaaactaagagcctgctgttagtaagccctgcaggacatagtcccagttccactggatgaagcctgaaatatcaaaatcattgatgggtgatgttggttctattgcaagttgaattatggagactgatagaatcttaggcctgttacttaacatctttacagattctgtttcttttcctgtaaaattargataataatgcctgtctcatggttgttttgaaatttaaaattgcaaatataggtaaagtgttgaggctaatgcttgtgtcactgtagctattatgctatttttattatttttttcctgctacttactgggcagagtttactcttcagggccttgagtccttgaggacagctagtttgccccatattctttatcgcctccccaaaacatcagctcctgttgtttttttcccctgccctctcatttccaaattgcccaatctttcattttcactggttctttcactgctcccctacctcccacccttttctagtctactttttagaaacctagaaactaagcttaccaatatattttttatagtcacaaaatgatctctctacatctgtgatgtcattgaattcttatttccccaaatcccaactaacaaacacatccatgcacttttacgcagtcactttttggcagtggtctcctatagaaatgactcattattccacatcacctctacctttcagattttaatgttactatttgtgataacatcactagaacagtgtttaatagtttggtataatgtacatatctgccttgttcctaattattttttatttcccccccgagatattaatgagctacattaaatagatatgtacagtcatagtcattgaatataagatactgctgattttaagaagcacatccactttacggaccaataagaaaaaaaataccaattattagacaccatcaattgtgagatgtattcctatttcaaagacgttaaaatatgaaaaaatgtaaacgaggattgatgagatatagtatagcatttttaatcttaacttttctgttaaaatttctatatattcttgcttgatagaaacttttcaaattttcttacttttgcactttcagtgaactgtatctgaattactttttgcttcattgcagactaaggcatttttacttggtctagttctttccaaatgtttaatgtctttatgattacataacttgatcatcttctgtttacaaattcccatcacggcacaaagatgcagcatcatttgaatgcttgagatggaaaacattttttcgattttcaggaagggtgagctatactgaaattttctcagctcctctccccacacacagaattacgtattaactcttcttatgctaacttcatgctagtagccactgtgatgtcatagagccctctgactttatactgtttaccttttataatttttttattttacacaattttgaagctcagatttattttgccttctatgtcatcttggagcttaatggtaaagcccgcccctttaatccatttttctcactgccctccgccccccgcccattacttcactttctcattatctctagagggaagacttagaaatgtagtttactctgagagaatacttacattgaggtgaggaagaatagatacctagaggtgattgtatattggaatttagtgcactttaaaactctcagttgggagaagagtcactatattttttgtttgaagaaagatagttctgtgtatacttgagggctacaactcaacgcagatgtcaggtaacctgttaaatctggattgtcatctcaaggacataggggtgtgtgtctgggaaacaggaagaaaaagaaatattatgaaaactgatctctctaccagttaaaacattttaaggaactgaagttctgtgtaaatgatgtcatataatattgtaatgttcttaaatcttacatttagtttctaatataatagaatattaaggaagtactgtttgsatagtcattcctcatagatgacactgaaacctaattaaactggttgaaatgattatcaaattgttttattcttactgagcaattgttcttaccattggaattcacagatttttagggaggagtttctatgaactgaacttatatgtaaagtttgggcattaggcacaatttattagggttttgtagggaaactcctcaaagggattattattaataactcaaaagaaattaatacatttttacagagttttaggtcagcactgtttctctcttatctggccttcattgtgatcttgattgtaaatcagtagaatcccagggtatttcaaagctcaaaagaaagaaaacttstcagccctggaaacgggagcattgttcaagtggtgcactagaaaaaatggcagtactgcctacaaactatgagggaattcactgttaggaagtagtaagtgtaaaggtggtactgttttcacaaaaaaagacatttagattatggactatggatcaacatacgttgataaatgtgaaggattaaaaatatgcttctgttttaacttgagtgattaatttcgtagttgtgatttaaattatatttctaaggagaatatatattggaaataataaattatttggtatttgtgtatatgtatgtatgtgtatgtatgtgcaggaatcactttttaatgtttatgtgagtaattaaaaaattttttttattatagtgcatgcaagatatgggaaatactaaagcaagactactctatgaagccaatcttccagagaactttcgaagaccacagacagatcagtatcctttaaaacttatttgttttgagtttaaaaaacattaactcatttttacagttcatattttatctgttagtatttaggaagatgtgaactttatcacgctactgttcattaaagatagaaattgacttgctgtgagctgtgctttgtatatggtaggtttttagtaggaatttggcacacagattacataattacataaaaatacacgatacatatggtatttagatgtgattacagacccctgattcacaatgattatttgacttacgatttttccacttcatgatggtgagaaagcagtatgcgtttggtagaaactgtactttgagtactagtgtaaccattctgttttcacattcagtacagtattcagtaaattacatgagatattcaatactttattaaaaatatgctttgtgttagaagattttgctcaaccgtaggctaatgttagtgttctgagcacatttaatgtaggctaggctaggctatgtttggtagatwaggtgtattaaatgcatttttgacttaaaatattttcaacttaggatgggtttactggggcctaacccattgtaagttgaggggcatctctgttactaagtgtaaaatgttatgactgattcttcttgattgttctccatctctcaattggaaagtatatgctgtttattattttagactgttactagaaacttgatttgtaagcatcctgagtatgttagaaatcatttccatatattctttgattacctttatatagtagttatatttatgtgaggcattgtggcatttagaaggcaaattacatagtattttttacatagcgtaaattctgagtaatttacactactgacactctgttgtaggttgcacaactatgtttgctttatgaatccacctttatgagtggatagaattgtttcccacataatccacctttatgagtggatagaatagtttcccatgaaaacattttaatatgttttttatgttttctaaatataaaatcataattctgtaggatttttataactcatagtttaaaaaagcagctcatcaaaattgtgctgctttataaataagattatctgattaattgtaggtacgtggattctgtttgaaggtaacatttgtgactttgacaataaaatgtagtttattaacgatcaattatattgtacccatttgtatagtaaaacaatttgtgtggccagtggaggaaatatcttttctcacacagagatataggtcattatatrtttatttccacatttggacagaaaccttttaaattataattgagaagttagtaatttgtatttggcgttttctgtttctgttcgccccactcctttctcacaaatttagcagtctgatatccgaagctgtatttgttatagaaagtttgcagggttaatggtagaaggttcatttcaggtataaaaaattgtgtgagtaaaagtatggaggtatgagagaacatgaccttttaggtcagaagaagcttggaaggtattttggtccaaattgcgaagggttttcagtatgatgtagagtagtttagacctcatttcattggcccaagtgtttaaaaacacatgaaggattttgtcaatgtacaaaaatcacaagcattcttatacaccaataacagacaaacagagagccaaatcatgagtgaactcccattcacagttgcttcaaagaggataaaatacctaggaatccaacttacaagggatgtgaaggaactcttcaaggagaactacaaaccactgctcaaggaaataaaagaggatacaaacaaatggaagaacattccatgctcatgggtaggaagaatcaatatcgtgaaaatggccatactgcccaaggtgatttacagattcaatgccatccccatcaagctaccaatgactttcttcacagaattggaaaaaactactttaaagttcatatggaaccaaaaaagagccggcattgccaaggcaatcctaagccaaaagaacaaagctggaggcatcacactacctgacttcaaaatatactacaaggctacagtaaccaaaacagcatggtactggtaccaaaacagagatatagatcaatggaacagaacagagccctcagaaataacgccgcatatctacaactatctgatctttgacaaacctgagaaaaacaagcaatggggaaaggattccctatttaataaatggtgctgggaaaactggctagccatatgtagaaagctgaaactggatcccttccttacaccttatacaaaaatcaattcaagatggattaaagacttaaacgttagacctaaaacaataaaaaccctagaagaaaacctaggcatcaccattcaggacataggcatgggcaaggacttcatgtccaaaacaccaacagcaatggcaacaaaagccaaaattgacaaatgggatctaattaaactaaagagcttctgcacagcaaaagaaactaccatcagagtgaacaggcaacctacaaaatgggagaaaattttcgcaacctactcatctgacagagggctaatatccagaatctacaatgaactcaaacaaatttacaagaaaaaaacaaacaaccccatcaaaaagtgggcgaaggacatgaacagacacttctcaaaagaagacatctatgcagccaaaaaacacatgaaaaaatgctcattatcactggcgattagagaaatgcaaatcaaaaccacaatgagataccatctcacaccagttagaatggcaatcattaaaaagtcaggaaacaacaggtgctggagaggatgtggagaaataggaacacttttacactgttggtgggaatgtaaactagttcaaccattgtggaagtcagtgtggcgattcctcagggatctagaactagaaataccatttgacccagccatcccattactgggtatatacccaaaggactataaatcttgctgctataaagacacatgcacacgtatgtttattgcagcattattcacaatagcaaagacttggaaccaacccaaatgtccaacaatgatagactggattaagaaaatgtggcacatatacaccatggaatactatgcagccataaaaaatgatgcgttcatgtcctttgtagggacatggatgaaattggaaatcatcattctcagtaatctatcgcaagaacaaaaaaccaaacactgcatattctcacttataggtgggaactgaacaatgagatcacatggacacaggaaggggaatatcacactctggggactgtggtggggtggggggaggggggagggatagcattgggagatatacctaatgctagatgacgagttagtgggtgcagcacaccagcatggcacatgtatacatatgtaactaacctgcacattgtgcacatgtaccctaaaacttaaagtataataaaaataaataaataaataaaaataaaaacacatgaaggattttgaagcaggagaaacattagaaacattaacttccactgtaaggaagaatagttggaggtgggaggagagcctagaagcagagagaccatgtgaaatacttatacagcccaaaattagcaatgacaatctaagttagatagtggcattgggaatgggcaggattaaattggagagattggaaacaagttgggaaagctacattaagattggctttggttctgagggagtcactaaaataaccctgaaatttctagcttggttgaccataaagcttattcactgggagaaggaattcattaccagcaggaggattaagagttagaaatgaaagataatgagccatgctttcttactttgggcagattgatacttctgttacacatatacatggagttaccccatttggtkgctggaaacatgagtctggaccctagaagagagcagtacattcagattgaggagtcrcttagcatgtaggtgatgatataaagtgctgggtcagcttatgtttacctagggcagcagttctttattttgcagattttattgagaatcctgagaattcttttccttctctggaaaaggaaagcctgtggctgaatcctgaagaataaagcatggtagaaggaaaaacagcccagcatacaaatcagcattgtaggtggttgttaccagctgcttgctggttacattaatttattccctctttttttgccccccactcactaggctgagttgatatatatgacccctcgaattgaagaatcctccttttctggaagtttgtgtctgtggcagggtggggaggttgggttgggttggattttttaggtgtcccttgaatataacagggtaaattacttgacgtttttgaaaattttggtttcatcctttatgtgttacctatgcatgagagtagcttccaagttatttaatttattacactgattccatattgttttcaaattatcatgaaggatattgagggcaggacagtatatatcttcttggtatcctcacttattgaactattctatgcaccattttgtgtaggttggtaggaatactgtttcttcattaccaccaattttatgatgcaccttagagagctaaagtgctaatgagatattgcattattagttctgttatcttggctgatatattttaaaatatttggtccttttctatagatttcaggaaagatgagatttttatagtgaattgattggtgtctatattggtaaatccttgacgttcgacacagtgaagatataatactggaaacaacagctgtaataactttactgcttaataagtgtttgccctatgccaagccctgaccatggcattttatgtacattatcttttttatttctcaaaataactcggtgacatagagcataatattttcttttgtggggagtggggtgggaaggatgagatgctcaaagagctattaagaaacttcctaaagcctccagactttccctcctgtatcgggacacttgagtattatttaatgatggtagtctgagtaaaatcagtgctgccacatttaagtcttgattgcctttgaaaatagggttattataatttggcactcttggcagctagattgtaagatctaggtgaagatttcaacttttcattacctggtatgatttatgttaggcttttggattaactatatatttgctgttgttacctcagtcattcttatttaatttttcaaactaaatgttactcctttttacaaattatggtcatatttatgtgaggtattgatctttattgttcatatggttgtcagacttgtttaaagagggtctttgtctaacatgtttgagctagatgattacttatgttaagagtataagatgacaattcttggaccatgagactagtccccatatctaatgtaatctgtagcctttaaaaaaattaccttggttattataacaatactttttattcttttaattatgaaacactgtaatttggaggttttgtagggagaggctggtaagaaaaccggcttgcctttctctctccctccctccagtctttcctttcatctatccatctttctaaagctcattgctctttgaaaagcctaacatttctgtagttttatagatataaatatagttgtctcatccctagagcaagtataaccaaactaagttaaactcatataatatgggacctcattgcattcttaacaagatttgtcactttttaaaaagctttgcaatttacaaaagttatgcaaaagctgctgtgaaagtgtaatttctaatgtgggatgtggttaattataggctgcatgtcctagtgcatgacaaatgataaagctttacattaagcttttcattattaggatattttgtcttatctaaaaaactttaattacttcagttccatgagatctattgtgtaccaaagctaatcagcagttctcctttgagcttttcaaagttttactgctgtcagtgctgtgtgtttgaaactggaagattttcttctttgggagtagatattaatttagttgtctttcaaatggtatatttttaaagaaaagaaaaaaatcttaaaatatatagatacatgttaaaagataaagcgtataataatgttgaaatttttgtaggcttgtatagtaccaattgttagttttggggacagggagaattaggggtgctgtactgagtgctttataactgtaggcatggggaagattctgggatagtttgatattgtttactaagtaattcccaaattaaaacttgaactgttattataataatgtatttcttatctgactccctgaaaatattattgttctgtttctaattttttgggttgtattattgatctatgtcagtataactaagtccttatatctcaaatgacttctggagactgtaaaatgaagataaatagttcctgatctccagattcattggttcttttgttgtcgtttctcatttactcatctgtttaaacttgatggtatgcaagccatcttagccctcagtacagtaattctgtttcctcttgctaccatggaccctatcttttaagtgatttgcctatcagaatacctttgttaataataagagctaaaacttaaataacactatgtaccatctactattttagttgtttagatactattggcttatttaattcttataataatcctatgagatgatactggtwttatccccattttaaaggtgatgaaaccgaggcaccaaagtatataaaaataaaactaaattcatacgttaaattcttactgttagatactatactaagtgctttatgtatatcttaatcttcaaactcttgtcaaccttgtgaggtgagtattactatcttttttacatatctaggtataggttcaatagatcagctaacctaaaggtcacaataactgccggtgtaataataagtgcctacctgtactggaaatgaggctgtacattggagactatcttctttgagaatgtcaacatataatgcaaaactatggtaaaaatttccttcgaaaatctttagattgtttatgatgacagtttacagacacatgtmcccctaataatccatttggctgttctttgccctctagtactgaatagaattcaggaatcagtaactacaggcccatgagctagctgcctgtttttgtaaataaggttttattagaacccagccatgtacattcatttatgaatgttctgtggtcgctttggagagctatgaagggacagttgagtgattgaaacatagaccaactgtcccacaaagcctaaaacatttactttctgggcctttaaggaaaagtttgccaacccctgggataaataactgtttctttaggtgaactaacagtacagaattggcttgcatttgggaccttgtacaaaaatatacaaggactgtgtgagacattcttgcagtaggaggcacataggaactgagagcaaccaaagatatagcatgttttccaaactagatttcttccttgggtgactccatggaatttaaaaattcactttgtagtgtacttggattgccttttaaaaagtataaaaagtgatcttatgttaataattaggaaggttctagtaagttcttctaccctaatgctttatttttatatctttgaaaaacactatgtaccaaacataccaactttggcttcttataatttttwaaaaatgtatacttcytagagataagttctgaaaggatttcttattgtaaacagaagtgagactctcaactgcatttgaattatttatataaaatacattaaatataaattaagatttcacagatacatgttattttggaaaattcacagcaacatacagataataataccagatgttagtattgtattcaactccagaagattgtatacttaacatagttaactttcrcaaactcagtatttgtaaaaccatcgtagtattctacataggaataccttgttttattgcatgttgctttatttgcactgtacagatattacttttttttttttttttttttttttacgaattgaatgttgtggcaaccctatgcaaagcaagtctgttggcgccatattttccaacaacacatgtttactttgggtctccatgtcacactttggtagttcttggaatatttcaaacttttttattagtagtatatctttatggtgatctgtcatcagtgatctttaatgctactgttgtaattgtttcagggcactgggaactgcaccagtataaggtggcaaatgttataacaaaattataacataaatgcatgtttttaattaatttataaaagtttgcattctgactacactgatcagcttttccctttcttttcctctgcactccgtattctgtgatacaacattaacacctacagtagcttctaagtgttctagtaaaagaaagagtctcaccttgctcattttaaatcaaaaagctataatagaaaggattaagctagtgaggaaggcatgtggaaagaaaaataggctgaaagctaggtctattgcaccaaatagtcaagttgtgaatgcaaaggaaaaattcttgaaggaaattaaaaagtgctactctagtaaacacatgaataataaaaaagcaaaacagcctttttgctgatatggagaaagttggagtggtttggatagaagttcaaaccagccacaacatttccttaagccaaagcctaatccttaacaaagctttaactcttcagttctgtgaaggctgagagtgatgaggaagcctcagatgaaaagtttgaagctagcataggttgagtcatgagtttgtgtttttgttttgtctgttgttttgacaggttctcactgtgtcacccaggctggaatgcagtggggcagtcaactcactgcagcctctgtgtcctgggctcaagcgatcgttctgcctcagcctcctgagtagctggaactacacatgcacactaccatgcccagctaatttttttttttttttgtaaagatgggcttgctatattgcccaggctgttcttcractcccaggcttaagtaatcctcctgccttaccctctcaaagtgctagaattacacatatgagccactgttcccagcctggttcatgaagtttaagaaaagaagccatctgcagaacataaaaatcaagatgaaagagcaagttatccagaagatgtaactaagataattgatgaaggtgactacactaaacaacacattttcagtggagactaaacagccttctgttggaagaagatgccattgaggacgttcatactggagaagtgaagtcaatgcctggcttcarcgcttcaagacaggctgactttcttgttaggaaaatgcagctggtgactttaagttgaagctaatgtttatttactattttgaaaatcctacggcccttaagaattaagctacatctattctgcctgtgctctctaagtggaacaacagagcctgggtgacagcacatctgtttacagcatggtttactgaatacattaagtccaccgttgagacctgctgctcagaaagaaataatttttttcaaagtattactgttcattgacaatgctcctagtaacccaagagctctgatggagatacacaaacatgttgtttcatgcctgtcaatacaacatctgttctgcagcccatggataaaggagtagttttactttcaagtgttttttctttttttttgacagggtctcactccattgcccaggctggaatgcagtggtgcgatcatagttcactgcacccctgactttccaggctcaggtgatccttccacctcagcgtcctgagtatttgggactacaggcacaccactaccacacccagctgatttttgtatttttttgtagagatggaattttgccatgttgccaggctggtcttgagctcctcggctcaagcgatcagcccacctgggcctcccaaagtgctgggattacaggcaagagccattttgcccagccagaaaacttgtctttataaacagtgtccaattattcctcttaataaatggaatgtttagattttatgtccagcttgcgtccctggcccactgtgagtgctttcataatgccccaattcttttcatatccaccatatagagcctcacttaatgtctttgataggttcttagaaaccacgactttaagcaaaatgacatataatgaaaccggttttaccctaggctagttgatgtaaacaaaagttaagttcctatggcatatttctggtcacaaatatatgacatttctaaataaagacccataacatgtctaataccaaagtttgaaataaatgtgagttatatacatacatttaaggaagactagtaaaaacaagtgagataattatttacccaatttttagtgaatctatgagtgatagtcatagtggtggtgggtcaaatcaaggaataaatgtttgtaaagcaaaaattgtattgagcacctcctaccataatgaagttgaaaaacaacaaatatgatgggcttcctgaggactttcttaccacatcatttatttattgtgcatttgtatgattgtatacttgacaaatttttattttacaatttgtattcacttttctttttttattttttatttatttttattttattattattttactttaagttttagggcacatgtgcacaacgtgcaggtttgttacatatgtatacatgtgccatgttggtgtgctgcacccattaactcgtcatttagcattaggtatatctcctaaagctatccctctcccctccccccaccccacaacagtccccagagtatgatgttccccttcctgtgtccatgtgttctcattgttcaattcccacctatgagtgagaatatgcagtgtttggttttttgttcttgcgatagtttactgagaatgatgatttccaatttcatccgtttccctacaaaggacatgaactcatcattttttatggctgcatagtattccatggtgtatatgcgccacattttcttaacccagtctatcattgttggacatttgggttggttccaagtctttgctattgtgaatagtgccacaataaacatacatgtgcatctgtctttatagcagcatgatttataatcctttgggtacatacctagtaatgggatggctgggtcaaatggtatttctagttctagatccctgaggaatcaacacactgacttccacaatggttgaactagtttacattcccaccaacagtgtaaaagtgttcctatttctccacatcctctccagcacctgttgtttcctgactttttaatgattgccattctaactggtgtgagatggtatctcattgtggttttgatttgcatttcactgacaggcagtgatggtgagcattttttcgtgtgttttttggctgcataaatgtcttcttttgagaagtgtctgttcctgtcctttgcccactttttgatggggtggtttgtttttttcttgtaaatttgtttgagttcattgtagattctggttattagccctttgtcagatgaataggttgcaaaaattttctcccattttgtaggttgcctgttcactctgatggtagtttcttttgctgtgcagaagctctttaatttaattagatcccatttgtcaattttgtcttttgttgccattgctgttggtgttttagacatgaagtccttgcccatgcctatgtcctgaatgataatgcctaggttttcttccagggcttttatggttttaggtctaacatttaagtctttaatccatcttgaattaatttttgtataaggtgtaaggaagggatccagtttcagctttctacatatggctagccagttttcccagcatcatttattaaatagggaatcctttccccattgcttgtttttctcaggtttgtcaaagatcagatagttgtagatatgcggcgttatttctgagggctctgttctgttccattgatctttatctctgttttggtaccaataccatgctgttttggttactgtagccttgtagtatagtttgaagtcaggtagcgtgatgcctccagctttgttcttttggcttaggattgacttggcgatgcgggctcttttttggttccatatgaactttaaagtagttttttccaattctgtgaagaaagtcattggtagcttgatggggatggcattgaatctataaattaccttgggcagtatggccattttcatgatattgactcttcctacccatgagcatggaatgttcttccatttgtttgtattctcttttatttcattgagcagtggtttgtagttctccacttgaagaggtccttcacatcccttgtaagttggattcctaagtattttattatctttgaagcaattgtgcatgggagttcactcatgatttggctctctgtttgtctgttattggtgtataagaatgcttgtgatttttgtacattgattttgtatcctgagactttgctgaagttgcttatcagcttaaggagattttgggctgagacgatggggttttctagatatacaatcatgtcatctgcaaacagggacaatttgacttcctcttttcctaattgaataaccctttatttccttctcctgcctaattgccctggccagaacttccaacactatgttgaataggagtggtgagagagggcatccctgtcttgtgccmgttttcaaagggaatgcttccagtttttgcccattcagtatgatattggctgtgggtttgtcatagatagctgttattattttgagatacgtcccaccaatacctaatttattgagagtttttagcatgaagggttgttgaattttgtcaaaggccttttctgcatctattgagataatcatgtggtttttgtctttggttctgtttatatgctggattacatttattgatttgtgtatattgaaccagccttacatcccagggatgaagcccacttgatcatggtggttaagtttttgatgtgctgctgggttcggtttgccagtattttactgaggatttttgcatcaatgttcatcaaggagattggtctaaaattctcttttttggttgtgtctctgtcaggctttggtatcaggatgatgctgacctcataaaatgagttagggaggattccctctttttctattgattggaatagtttcagaaggaatggtgccagttcctccttgtacctctggtagaattcggctgtgaatccatctggtcctggactctttttggttggtaagctattgattattgccacaatttcagctcctgttattggtctgttcagagagtcaacttcttcctggtttagtcttgggagggtgtatgtgtcgaggaatttatccatttcttctagattatccagtttatttgygtagaggtgtttgtcgtattctctgatggtagtttgtatttctgtgggatcggtggtgatatcccctttattattttttattgcgtctatttgattcttctctcttttcttgtttattagtcttgctagtggtctatcaattttgttgatcttttcaaaaaaccagctcctggattcattgattttttgaagggttttttgtgtctctatttccttcagttctgctctgattttagttatttcttgccctctgctagcttttgaatgtgtttgctcttgcttttctagttcttttaattgtgatattagggtgtcacttttggatctttcctgctttctcttgtgggcatttagtgctataaatttccctctacacactgctttgaatgtgtcccagagattctggtatgttgtgtctttgttctcgttggtttcaaagaacatctttatttctgccttcatttcgttatgtacccagtagtcattcaggagcaggttgttcagtttccatgtagctgagcagttttgagtgagttttttaatcctgagttctagtttgattgcactgtggtctgagagacagttygttataatttctgatcttttacatttgctgaggagagctttacttccaactatgtggtcaatttgggaataggtgtggtgtggtgctgaaaaaaatgtatattctgttgatctggggtggagagttctgtagatgtctattaagtccgcttggtgcagagctgagttcaattcctgggtatccttgttaactttctgtctcgttgatctgtctaatgttgacagtggggtgttaaagtctcccattattattgtgtgggagtcttaagtctttttgtaggtcactcaggacttgctttatgaatctgggtgctcctgtattgggtgcatatatatttaggatagttagctcttcttgttgaattgatccctttaccattatgtaatggccttctttgtctcttttgatctgtgttggtttgaagtctgttttatcagagactaggattgcaacccctgcctttttttgttttccatttgcttggtagatcttcctccatccctttatattgagcctatgtgtgtctctgcatgtgagatgggtttcctgaatacagcacactgatgggtcttgactctttatccattttgccagtctgtgtcttttaattggagcatttagcccatttacatttaaagttaatattgttatgtgtgaatttgatcctgtcattatgatgttagctggttattttgctcgttagttgatgcagtttcttcctagccttgaaggtctttacaatttggcatgtttttgcagtggctggtaccggttgttcctttccatgtttagtgcttccttcaggagctctcttagggcaggcctggtggtgacaaaatctctcagcatttgcttgtctgtaaaggattttatttctccttcacttatgaagcttagtttggctggatatgaaattctggcttgaaaattcttttaagaatgttgaatattggcccccactctcttctggcttgtagagtttctgccgagaggtcagctgttagtctgatgggcttccctttgtgggtaacccgacctttctctctggctgcccttaacattttttcctgcatttcaaccttggtgaatctgacaattatgtgtcttggagttgctcttctcgaggagtatctttgtggcrttctctgtatttcctgawtctgaatgttggccttccttgctagattggggaagttctcctggataatatcctgcagagtgttttcgaccttggttccattctccccgtcactttcaggtagatcaatcagacrtagatttcgtcttttcacawagtcccatatttcttggagactttgttcgtttctttttattcttttttctctaaacttcccttctcgcttcatttcattcatttcgtcttccatcactgacaccctttcttccagttgattgcatcggctcctgaggtttgtgcattcttcatgtagttctcgagccttggctttcagctccatgaactcctttaagcccttctctatattggttattctagttctacattcgtctgaatttttttcacagttttcaacttctttgcctttggtttgaatttcctcttgttgctcggagtagtttgatcgtctgaagcctttttctctcaacttgtcaaagtcattctctgtccaccattgttccgttgctgatgaggagctgcgttcctttggaggacgagaggtgctctgctttttagagtttccagtttttctgctctgttttttccccatctttgtggttttatctacttttggtctttgatgatggtgacgtacagatgggtttttggtgtggatgtcctttctgtttgttagttttccttctaacagacaggaccctcagcttcaggtctgttggagtttgctggaggtccactccagaccctgtttgcctgggtaccagcagtggtggctacaggacagcggattttcgtgaaccatgaatgctgctgcctgatcgttcctctggaagttttgtctcagaggagtacccggccgtgtgaagtgacagtctgcccctactggggggtgcctcccagttaggctgctcagaggtcaggggtcagggacccacttgaggaggcagtctgcccattctcagatctccagctgtgtgctgggagcaccactgttctcttcaaagctgtcagacagggatgtttaagtctgcagaggttactgctgtctttttgtttgtctttgctctgccccagagttggagcctacagaggccggcaggcctccttgagctgtggtgggctccacccagttggagcttccaggctgctttgtttacctaggcaagcctgggcaatggcgggcgcccctcccctagcctccctgccgccttgcagtttggtctcagattgctgtgccagcaatcagcaagactccgggggcgtaggaccctccgagccaggtgtgggatataatctcctggtgcaccgttttttaagcccgtcggaaaagcgcggtgttggggtgggagtgacccgattttccaggtgccgtctgtcacccctttctttgactaggaaagggaactccctgtccctttgcgcttcccgagtgaggcaatgcctctccctgcttccgctcgcccacggtgtgctgcaccactgtcctgtgcccactgtctggtactccctagtgagatgaatccggtacctcagatggaaatgcagaaatcacccatcttctgcgtcgctcacgctgggagctgtagaccggagctgttcctatttggccatcttggctccaaataactattcattcacttttcaacctgcttactccaggttagggttgctggtggctggagctgtcccgtctgcccagggcacaaggtgggaaccatcctgggacaggacactgttctattgcagggtgcacttacatacacccacactcactcatactgggccatttagacatgtgaaataacctgatgtgcatatcttggggatatgagatgaagcttgagtacccatagaaaacccaagtaggtaggggaaaatttggaaagtctacacagacagtggctcgggtagaaataaattttttgtttcatcagtgtcgtaagaaaacaacattattctgggacgtgttgtgtggtctgtcatccctttctattacctgttgcctcaactgtcattttaaaaggctttttaaaaaatttttatgaatggttattgactgaaactgtattgtattaccgcccaggtaacttttcttttgactagaatgatccccttaacttgggggatccacagagatattatatttcagtgtaattgggtttttttctgtaattatgtgtgttttatgcattgaaaataattatmagaaaggagtcttcaggctttacctgagtaccagaggagctcatgtcactaaagaggttaagaacccctttaagaatttccatttcagtggaatatgatgagtggtaagagaagttattgatgtcacgtaactctaaacactcaatcccagtataaattactcactctattaacaggtaagatgagtccagacaacttcaagaatttaaagaagactaacgttggctttatcatcttgacttttccatttctcaactttgcaaggataaaattggccactgttcttctaatacatgtggaatcctatatgatgtgcccagggacagcatatatagtggaaaagaacatagatgttggaatcacaagtgcttaatctttccaagttgctgtttcttcatctatgatatggaactaataatrtgcacattcgtggggtgtgggaggaattaaaggacccaaagtatgtacagcatatatagtataggatgtctggctcagtgtgggtacttgcatagatgttaatttcttataccaaaaaccccaaatgaacytgaattgaatttaaagtgtggtgatgcattgatagtggtggtggtgatgtaggaattaagaattgtcatttacttttctttctagaattagtttggatgagttttgttcagtgagaaaatttcctgaaagaggtagacttctttaagagaaagaaaagtagtttacagaatgtagttgcagaaataatgtgaaagagagcacagattgaggagtaggaaaattaaatttagagtcccarctttgtggagtggcgtgaataaagggaagtgtacatatcactgaattcatgcttttccttaagttatctgttttcagagcagtggaatttttcatcagagataaatatgaaaagaagaaatactacgataaaaatgccatagctattacaaatgtaagtaaaaccttcatctctcatcaattgtttgttgastagatttcaaacttttaacatgcaatacagcttaatttatttattgtgaaaacatactagttgtatatatttacatttgaatattggaacttttttggttatataatgttgagctcttgcagagcagaagtcttgatttagaaaggagcatattctaaatctaataaccacttacatggcatttaattaagttaatttttgaaatttgcaaaaaagctagaaccactaattgaaaatggtgggagagaaattttttcccctagattctagaaatgtatgaaaaagaaaaaaggcaaatatatgtcttcctctaagggctttctttggttggtccattgagaaatgaaaccagtagcccaggaatatattaaaagatggcatttacatttgttattagcaagcattttgatactcctaatagttaagtctttacagtagtaatcaaataccatcaggtacccataacaaggtttcagtcaatgacagactgtatatacaacgttggtcctataagtttataatcccttatttttactgtactctatgtttagatatatctgcatacacagatacttaccattgtgttagaattgcctacagtattcactatagtaacatgcagtacaggtttgtagcctgggagtaatagatgttaccatattacctaagtatgtagtaggttgtaccatctaggtttgtatgagcacactcgattatgtttgcacgatgatgctgtcatgtaatgatatgtttctcagaatgtatcccaattgttaaatgacacaggactgttatgttttatcagctgtttctttttagttttttaaaaattttctcatccaagttaattatattctaaggctaattgcctttattgttgaaatcatttttggactttgattcctagattgataagctataaaccagttaatcttttggtgaagtcatctgtcaagcaatttagatactatggaaatagattcatctcatttttcatacaaactggtttcctatttggcccatatggagaagcaatatattaaaaattcagtaaaatcctaataaagttaggatattttaatatgctatctttggccataaaaaaatcttgttaaaaaagtttttaagtatcagctcaatatggtagctcatgcctgtaatcccagcactttgggaggccaaggtgggaggatcatttgaacccaggagttcaagaccaggctgctgggcaacatagtgagaccctatctctttttattaaaaaaaatttttatttttttttcgactgggcatggtggcttatgcctgtaatcccagcactttgggaggctgagtcaggtggatttgagaccagccwggccaacatggtgaaaccccgtctctactaaaaatacaaaaattagctgggcccagtggtgcatgcctgtaatcccagccacttgggaggctgaggcagagttgcttgcatccaggaggcagaggtttcagtgagctgagattgagccactgcactccagtctgggcaacagagtaagattctgtgtcaaaaaaaaaaaaaaaattaagttttcaagtatcattagtgtgtattttagagcaaagatatccttgtgtgtagcattggagctgcatttacagtggatgtgaggaaatctgttgaagggttgattaaaaattgacagtattgagaatatttatgtctataaaattaaggccgctgtaagcattgatgggggaaaggactaacttaaaagtgtaatgtattttcatatgaaatgttaagaaatcattttagtttattttagggaacatactgtttcatattaaacacttttaaaatataatttdaaaaattatatttgtattatgtttcttttcttagcaataattaggaaattatttttacatagtaatgtgtaagatggttttattttgggatggtagctgttactgagttgggttttttccccccttcaaggtgtaataatggtatgcttagttgtaaaaattccttcatttataagatacgtggtagaataaaatacttggagattaaatgttatgatacctaacactttcaagtggtttggtgaaacctagcagctttgtgtgtttgtgtctgtagagagagaacaaatatggctaatgttagtatttgactaatattaatgatgtttatagaggtattcactctacagttccttcctttttttatgtaggcttgagagtaaaaattttaaggtaaaagtctgtttacttcagtatatactcctgagtttatagtactattgaaataaaaatgcagaaagatttacaaaagtcacaataaacccaagggaaaatgtattccacctattccaatataagcaaaataataataaataagyttatattgtagcagatttaaaggattttttcctctttcatggtgatcagtgagcaagtaactaatcttaggtattactgagaattacatatttctgttcagtgtttcatcttcagtaatagattgagcactcatccaaataaatttggatcacttactatgctcacaatctcctaggatactaaaacaaagaggacatgactgttagagacatttatcacagtggagacaggaacagatttaaaaaaatataagtaccttatatctaaggtattccaggagtactagagtacttaaggggtatccacagagggacatttatcatttcttctttttcttttctttttttttgagacagagtctcgctctgttgccagactggagtgcagtggcgcaatcttggctcactgcaacctctgccttgcgggttcaagcaattcttctgcctcagcctcccgagtagctgggactacaggcgtgctaccacgcccagctaatttttgtatttttagtagagacggggttttgccatgttggccaggatggtctcgatctcttgacctcgtgatctgcccacctcgacctctcaaagtgctgggattaccggtgtgagccaccacaccctgctgacatttatcatttctttgtgttgggaacattcagtatcatmtagctttttgaaaatatacactaaattattgttagccgtacttaccctataatactacagaacactaaatcgtactcctcctatctagctgtactgtcacatctgttaaaaatttctccccatcctttcctctcccttaccctttaatgtccatagttcttccctctacttccatgagttcagtttttcttagctcacacagaagaatgagaacacgtggcatttatccttctgtgcctgacttattttacttagcataatggcccccaggattatccatgttgctgtgaatggtaggatttcattctttttatggctgaatagtattccattgtgtatatatatcacactttaaaaatctgttcatctattgatggaaatttaggttaattctgtatcttggctattgtgaatagagctgcagtaaacatgggggttcaggtatctctttgatatgctaatttccttttctttagataaatgccctgtagtgggattgctggcttatatggtaattctgtttttaattttttgagaaacctccatattatccatagtggctgtactaatttacattcccaccaacagtatctaagagttttgttttctctgtatcctctctggtatctatcatctttttgataataaaccattctaactgtggtaagatatcttattgtggttttgatttgctgcgcccactgtctggcactccctagtgagatgaaccctgtacctcagatggaaatgcagaaatcacccgtcttctgcatcgttcacgctgggagctgtagaccggagctgttcctattcggccatcttggctcctcctgcatttctctgatgattattgatttgaccttttttatgtacttgttggccatttttgtgtcttttgagaaatgtctattcagatcttttgcttatttttttattattattttttgctgtcgagttgttcgagttccttgtatattatggatgctagtttcttgtcaaatgagtaggttgttaatattttctcttattttacagattgtctcttcactctgttaattgtctcctttgccatgcagaagctttttagtttgatgtagtcccatttttctatttttggttttgttgcctgtgcttttgaagttttattcataagatctttgcctagaccagtgtttcctatgttttcttctacaaattttatagttttgggtctcctatttaagtcttcattattaagtttttttttttttgagatggagtccccctgtttcacccaggctagagtgtaatggtgcaatctcagctccctgcaacctccgcctcctgggttcaagtgattctcctgcctcagtctcccgagtagctggcattacaggtgcgtgccaccatgcctggctaactttgtatttttgttagagatggggttttgccacgttgcccaggctggtctcgaactcctggcctcaagtgatccccctgcctcgggctcccaaagtgctgggattacaggcatgagccaccacacccagctaagtctttaatctatttttaataatttttaatttttgtgggtgtatagtaggtgtatatatttataggagacatgagatgttttaatacaggcatggaatgtgtaaaaatcacataatgtaaaatgggatatctaccccctcaagtgttatcctttgtgttacaaacacaaaggatattatgttgaatattatgttgaataagattggtgaaagtgggtatccttgtcttttttctgttcttagaagagaagttttcagcttttccccattcattatgatgttagctgtgggtttgtcatatatgacctttattatgttgaggtatgttcctttatgcctaatttgttgagaatgtttatcatgaagagatgttgaattttatgaaattctttttctgtatctgttgaaaagatgataaagtttttgtctttcattctgttgatgtgatgtatcacatttattgatttgtatatgttaaaccatttatgcatgcttgggataaatcccagttgatcatgagcagattgggcatgtgcaatggatgtcataggacccagatgagttaaccctcaagcccctggttgggtcatgtgggcggtggtggctgtggctatgtgggagggttcttgggtccccaggtggaggatgctaacaacagtgtcagtctgagtacgtcggttgtcaggcccctgggcagtccatgctggtgttggtggcagcagctctgagtaggcctgttctcaggcatccaggaggactttccagatatatatggtggccatggggtacctctaaccaagcccttccttgggtctctgggctgggtgtgtgggcactgacagtgatagggacaagccattcctcagtcctgtccactgcacaggcagtgtgtgtggatggtggccaaccgggccagtcacttctcaggtccctgggcagcatgtgcaggcatttgcattggtgtcccaggcaatgtatgtggatacacaatggctctgctcttggaatgggcagggtcactgtctgtggtggcagccccaggcaggcggttctcaggtctggagagcacatgcttcagctccttatatcctggagcagactccctgatgtgcaagactgcctcttctccagggtgtaggcttctgcaggactcaggtgccagggacttggctgcactgccgagtctagctggtgttctgatgctgagaccttccgggaagatgtcaagtgatgttgggagggagatcccacagatgtcaagatgctgggattattgggcttcagggctggatgtagtctagtgttggcggtactgtcaaaatggcactgtgcagcagcagcttggtcccagtgggtgggtgagatccagtatgaattctctctgagatagtttagttgcgtggactccaggcagctccttatactagactcagggcctgtgagggctgaaggactcttctgtagctaagattgcaggggctgtggtgggaatgtggactgttaaggatttttgcttaccttgccaccatgatggggagtccttcctggcttctagcctatcttggctagctgcatggcttccctcttgatgctgccatttcgagtttccctgcctctgagcttccttgtcacttacttactgattcctactgttctcccctagtgctctattcaatgtgttgaatagagcatgttgaatagaactgcccttgtgagggatccaggttgtgtgctccatttgagaatgttttgcgtgatgatctgaggtggagctgaagcagtgatgctagtgctggggagtggctacaaacacagatcaacattggcagagaggtttgactgcacagagaccatagtaaatcagttgcttgcagactcatatcaaaaccctgtcattgagtagtaggtgacaattaagctgcatctggtggcaggctttatagtggcaagtgagttgatgtacttcaactgtacggctgcatctggtggcaggctttaagtcagaatctgacatttgctttagcccacatatggcccgctcattatttgatttaccacagtcctgcccacaatctcagggttggtgtttatacagagtgtatataccagggggtggaaattttagtggctgtcagaattctgcctactatggtcatatagaatgagtctacctcccttgttctgcctgatttcattgagtgatgggaaatttgacaacagtttgcagaaatttgtcctgttggccaggcatggtggctcatgtctgtcatcccagcactttaggaggctgaagcaggaggatcgcttgagtccaggagtttgagaccagtttgggtaacatggcaagaccctgtctctacaaaaaataataatgaaaaattagctggatgtggtagagtgtgcctgtagtttcagttactcaggaggctgaggtgagagagttgcttgagcccaggaggttgaggcttcagtgagctgtgatcacaccgctgtactactacctgggcaacagacttaagaccctgtttcaaaaaagaaaaagagaaatctgtcctgtctgtcctccttcccttgctcacttaccagtagtgaatcacaatgggaagcaaagtattttaagtgagtttaagagatacaagaggacttaggtagatgaggctgaactgccacataatttgctcttttcctccagtagcttttctctttccccttgcgccatgctgtctctgtgtctcttcagctagtgagttgagattagcgtaaaagagcagggtctctacttggttttctttgttacttcttttcattacagtttgcttcctcttctgtgaaataaggatgtcatagtgtctgaatttcatagtattgctgcaagaattaagatgaagtatactctattcttattagggtgcctagcacataaccacttgcaatataagctattgtgatggcaggaaatgactgtaagcaggtagataagaaaaatgaatactcaaacttaattataagagtttatatcattggagaaatcttggcttgagttctgtttcattaattgctccacactttaatcagccctttaattataggacaccccaatagagcatgtaaaggacttaaaatttttttaagttttccagaattctacatatttcttattgacttggccacagattttaaagttaaaatattaaatattaagatttaggcttcttctacacacttggtagctatggttacttgggtaagttttcaatgtcttttaatcctcctatggatgagtttcattgatgttgtgttttgtatgggttatatactaatttagtaaatgtttacgttttcagcttttttaatccaagatatgccatggagtgcaaaactggaaatcatatatttaaaatgatttctagacttctgaaaaacttgagcttcatggtatactaaaagctcatgagacagccatttgagaattgctgtgataaaatttctacttagaaaacacatccaggaatttctaaaatgagattggaggaatccattgccaataattaatctataagatgtttttcagtgactgtatctttttcactgctttggaccaccagatttaattttcatagcattattctgtttaaaagggtggtagtagcaaatatttcaaaaaattcatcaagaaaattttaaacattatgctttatggccttcaattacttcataccttttcaaagggtgtttgttcaccttattcttgtaggtgggagttgggaacttgttttacgtggtcagtttttcttttgcatgaggtaagtttatacaattgtagtgttctgggagttttttcacatatcggttactttgatggtggcctagagaagaacgtctgagcttaagaataattgaaggaaggactgttaaactcattttatttctgaagaaaactcattttgtttctgaagaatgtctttactggatttctactgcgtattatctcatggatagatggggtgggtgggagttcggaaggacatttaagtatgactactgcattcactgacaccaccaatttccagcaaaattttctaaggtcagagtcttatactctacatgtataaaagtactaggagccagtgaaatggaattaatatctgttacaaaataaattctaaatttgaaagtaaatatggataacttctatgggatttcagtaaagtatgttagcaagccaatgaactttcaaagaacaattactgagattgagcctccttttggttctccttctgagatgcttccttcctcctcttttcctgtaacagttgaaaatatttattgagacctgttgaatgtcaggtgctaaagatggtgaaccgaatagaaataatatctgccacagataactttagttgaacaaagaatactgataagtaactagatttttataagacaacatgtgataaaacttacatatgaggcctagcttcccagcctacatttttctcccatgctggatgcttcctgccctgaaacatcggactccaagttctttagttttggaacttgaattggctctccttgctcttcagcttgcagacagcctattttgggaccttgtgatcatgaagacagatgccttcttggtcctcccctggaatttctagccctactatggatgtttctgtttgctctgtttctctgagtgagggctttattgttctttggatttgaagagaggccaacaacctccactgacccagatggccagtatggaaatatacatatgtggagccaagatggctgaataggaacagctccggtctacagctcccagcctgagtgacggagaagacgggtgatttctgcatttccatctgagctttgaagagagtagtcgttctcccagcacgcagctggagatctgagaacaggcagactgcctcctcaagtgggtccctgaccctcgagcagcctaactgggaggcatcccctagtaggggcagactgacacctcacacgactgggtactcctctgagacaaaacttccagaggaacgatcaggcagcagcatttgcggttcatgaaaatccgctgttctacagccaccgctttcctgtagccaccgctgctaatacccaggcaaacagggtctggagtggacctctagcaaactccaacagacctgcagctgagggtcctgtctgttagaaggaaaactaacaaacagaaaggacatccacaccagaaacccatctgtacgtcaccatcatcaaagaccaaaagtagatgaaaccacaaagatggggaaaaaacagagcagaaaaactggaaactctaaaaagcagagcacctctcatcctccaaaggaacgcagttcctcaccagcaacggaacaatgctggacagagaatgactctgacgagttgagagaagaaggcttcagacgaacaaactactccgagctacgggaggaaactcaaacaaatggcaaagaagttaaaaactttgaaaaaaaattagatgaatgtataactagaataaccaatgcagagaagtgcttaaaggagctgatggagctgaaagccaaggctcaagaactacatgaagaatgcagaagcctcaggagccgatgcgatcaactggaagaaagggtatcagtgatggaagacgaaatgaatgaaatgaagcgagaaaggaagtttagagaaaaaagaataaaaagaaacgaacaaagtctccaagaaatatgggactatgtgaaaagacgaaatctacgcctgattggtgtacctgaaagtgacggggagaatggaaccaagttggaaaacactctgcaggatattatccaggagaacttccccaatctagcaaggaaggccaacattcagattcaggaaatacagagaacgccacaaagatactcctcgagaagagcaactccaagacacataattgtcagattcaccaaggttgaaatgcaggaaaaaatgttaagggcagccagagagaaaggtcgggttacccacaaagggaagcccatcagactaacagctgacctctcggcagaaactctacaagccagaagagagtgggggccaatattcagcattcttaaagaaaagaattttcaagccagaatttcatatccagccaaactaagcttcataagtgaaggagaaataaaatcctttacagacaagcaaatgctgagagattttgtcaccaccaggcctgccctaagagagctcctgaaggaagcactaaacatggaaaggaacaaccggtaccagccactgcaaaaacatgccaaattgtaaagaccttcaaggctaggaagaaactgcatcaactaacaagcaaaataaccagctaacatcataatgacaggatcaaattaacacataacaatattaactttaaatgtaaatgggctaaatgctccaattaaaagacacagactggcaaaatggataaagagtcaagacccatcagtgtgctgtattcaggaaacccatctcacatgcagagacacacataggctcaacataaagggatgtaggaagatctaccaagcaaatggaaaacaraaaaaggcaggggttgcaatcccagtctctgataaaacagacttcaaaccaacaaagatcaaaagagacaaagaagaccattacataatggtaaagggatcaattcaacaagaagagctaactatcctaaatatatatgcacccaatacaggagcacccagattcataaagcaagtcctgagtgacctacataaagacttagactcccacacaataataatgggagactttaacaccccactgtcaacattagacagatcaacgagacagaaagttaacaaggatacccaggaatagaactcagctctgcaccaagtggacctaatagacatctacagamctctccaccccaratcaacagaatatacatttttttcagcaccacaccacacctattcccaaattgaccacatagttggaagtaaaggtctcctcagcaaatgtaaaagaacagagattataacaaactgtctctcagaccacagtgcaatcaaactagaactcaggattaagaaactcactcgaaaccgctcagctacatggaaactgaacaacctgctcctgaatgactactgggtacataacgaaatgaaggcakaaataaagatgttctttgaaaccaacgagaacaaagacacaacataccagaatctctgggacacattcaaagcagtgtgtagagggaaatttatagcactaaatgcccacaagagaaagcaggaaagatccaaaagtgactcctaatatcacaattaaaagaactagaaaagcaagagcaaacacattcaaaagctagcagaggcaagaaataactaaaatcagagcagaactgaaggaaatagagacacaaaaaacccttcaaaaaatcaatgaatccaggagctggttttttgaaaggatcaacaaaattgatagaccgctagcaggactaataaagaagaaaagagagaagaatcaaatagacgcaataaaaaatgataaaggggatatcaccaccgatcccacagaaatacaaactaccatcagagaatacgacaaacacctctacgcaaataaactagaaaatctagaagaaatggataaattcctcracacatacaccctcccaagagtaaaccaggaagaagttgactctctgaatagaccaataacaggctctgaaattgtggcaataatcaatagtttaccaaccaaaaagagttcaggaccagatggattcacagccgaattctaccagaggtacaaggaggagctggtaccattccttctgaaacgattccaatcaatagaaaaagagggaatcctccctaactcattttatgaggccagcatcatcctgataccaaagcctgacagagacacaaccaaaaaagagaattttagaccaatctccttgatgaacatacatgcaaaaattctcaataaaatactggcaaactgaatccagcagcacatcaaaaagcttatccaccatgatcaagtgggcttcatccctgggacgcaaggctggttcartatacacaaatcaataaatgtaatccagcatataaacagaaccaaagacaaaaaccacatgattatctcaatagatgcagaaaaggcctttgacaaaattcaacaacccttcatgctaaaaactctcaataaattaggtattggtgggacgtatctcaaaataataacagctatctatgacaaacccacagccaatatcatactgaatgggcaaaaactggaagcattccctttgaaaacgggcacaagacagggatgccctctctcaccactcctattcaacatagtgttggaakttctggccagggcaattaggcaggasaaggaaataaagggtattcaattaggaaaagaggaagtcaaattgtccctgtttgcagatgacatgattgtatatctagaaaaccccatcgtctcagcccaaaatctccttaagctgataagcaacttcagcaaagtctcaggatacaaaatcagtgtacaaaaatcacaagcattcttatacatcaataacagacaaacagagagccaaatcatgagtgaactccccttcacaattactaccaagagaataaaatacctacaaatccaacttacaaaggatgtgaaggatcacttcaaggagaactacaaaccactgctcaacaaaataaaagaggacacaaatggaagaacattccatgctcatggacaggaagaatcaatatcatgaaaatggccatactgcccaaggtaatttatagagtcattgcatccccatcaagctaccactgactttcttcacagaattggaaaaaactactttaaagttcatatggaaccaaaaaagagcccgcatcgccaagtcartcctaagccaaaagaacaaagctggaggcatcacgctacctgacttcaaactatactacaaggctacagtaaccaaaacagcatggtactggtaccaaaacagaaatatagatcaatggaacagaacagaggcctcagaaataatgccgcatatctacaactatctgatctttgacaaacctgacaaaaggagcaatggggaaacgattccctttttaataaatgatgctggggaaactggctagccatatgtagaaagctgaaactggatcccttccttacaccttatacaaaaattaattcaagatggattaaagacttacatgttagacctaaaaccataaaagccctagaagaaaacctaggcaataccattcaggacataggcatgggcaaggacttcatgtctaaaacaccaagagcaatggcaacaaaagccaaaattgacaaatgggatctaattaaactaaagagcttctgcayrgcaaaagaaactaccatcagagtgaacaggcaacctacaaaatgggagaaaatttttgcaatctactcatctgacaaagggctaatatccagaatctacaatgaactcagacaaatttacaggaaaaaaacaaacaaccccatcaaaaagtgggcaaaggatatgaacagacacttctcaaaagaagacatttatgcagccaaaaaacacatgaaaaaatgctcatcatcactggccatcagagaaatgcaaatcaaaaccacaatgagataccrtctcacaccagttagaatggcaatcattgaaaagtcaggaaacaacaggtgctggagaggatgtggagaaataggaacacttttacactgttgktgggactgtacactagttcaaccattgtggaagtcagtgtggcgattcctcagggatctagaactagaaataccatttgacccagccatcccattactgggtatatacccaaaggactataaatcgtgctactataaagacacgtgcccacgtatgtttattgtggcactattcacattaacaaagacttggaaccaacccaaatgtccaacaatgatagactggattaagaaaatgtggcgcatatacaccatggaatactatgcagccataaaaaatgatgagttcatgtcctttgtagggacatggatgaaactggaaaccatcattctcagcaaactatcgcaaggacaagaaacgaaacaccacatgttctcactcataggtgggaattgaacgatgagaacacatggacacaggaaggggaacatcacactctggggactgttgtggggtggggggaggggggagggatagcattaggagatatacctaatgctaaatgacgagttaatgggtgcagcacaccaacatggcacatgtatacatatgtaacaaacctgcacattgtgcgcatgtaccctacaacttaaagtgtaatcataataataaaaaataaaataaaaaaaaacttacatattagggaaatattataggaggtgcgtactccagactctatagagagatcaaggaatactttgaatatttcccagaggaagcagttttaactcaaaattaaaggatgagtaggaactaatagaagcatgggtttctgaagaagagggactagcaagaggaaaggcccctagagttcagagaagcagactagagaaaaaccagaaggagtcatatatggctgggcagagtgtatatgaatgtagccaggggaggaaagaatagggggataaggtagagatgacacttgtggcctgattaaggagtttgtactctgtccttatataatgtatataaactattcaggccttctaagcagtgatatgtggtggtcagttttacttcgagaatgacatggtatggagaatagatttggagaggagcaagatttggggcaaggagaccagttaggaggactaatccagaagatggatattgatgatttcctactagagatttagaaagaagactcgagtacctagcttttcatgtctctgtatttgttttctccttttcactgcccttttttcttccctcatttacccctgtgttctgtactgtcacttgcttccagttgtcaatatgttgatttctgtttctttattcgttgctcacataatgtatattaccctgctaatatgactttaaagagtgactttattgaaatataattcatatataataaaaggtagatattttaaggtacagatcaatgaatttttacaaatacatatcgctgtgtaaccactaccaccacagtcaagatatagaaccttttcgtcactccaaaaggtttctttgtgcccctcgctagtcagcccccaaccatggccttggtgactgatctgttttttttaatcaccatagattatattttcttttctagagttttatgtgagtggtttcatacacactgtgtacccttttgcgtctttcttccgttatgtttctgatttgttatgaattcacctgttcatctgtccattgacttttcaaatgtctttcttcttaagtttgttttctttcccaactggaacatggtattaaatcatttatttttcttttttcttttttttttttttggtattaaaatgtgatgtgcatctgttatcccagctatccgggacgctgagaggcaggaggattgcttgagttcaggagtttgagtccagcctgggtaacatagaaagactctgtctcaaaaaaaaaaaaaaaaaaaaaaagtggttactgaaatgaaaaaggtttttacttgagtccaggattcaaggttttagtgagctatgatcttcacactgtattccagcctgggtgacagagtgagaccctgtctgaatttttgttgttgttgttaaattactgatacttattgaatggaattttatattcctgctactgggttttaaaagtggccacatcagcttatcatcttctcaaatggaggacaagcacttatataatgaattatcttgctgctttctaaggattagtaacttttgacatactcaatgcccgtattatccttttatatttttgttccacttttcatgagcttgggcaaagaggtctttatgatacagctatcttctaaagtgatcgtacggctttttattctttttattttttatttttttgagacggagtctcgctctgtctccgaggctggagtgcagtggcgtgatcttggctcactgcaacctccgcctcccaggttcatgtgattctcctgcctcagccttccaagtagctgggattacaggcatgcaccaccacacctggctaaatttttatatttttagtagagacggttccccatgttggccaggctggtctcgaactcctgaactcaagtgatctgcgtgcctyggcctcccaaagtgctttattcttattttctgtataaagtagtaattaaagatttctagcaagtaaatatccaataggacaaaccagttttaagccaggctttaaggctcgactttgccttttttttatggaagatctacattttattgtgttgtttattttctatcctgtgtaacttgcattaatattcattaagtggctagcttacacaattataacagagccaacagtgagtaagcaaggagaaaaaaattccctgaagtttatagtcttgtgttgtgattcaggaattactgccataactaacttaataacaagcagattgagggaggacttgtcatcttgcagtgttattttgasattacataatgacctatctgtaatagcaccttttagttttaaaaattcctcataggcactattgatatgatagggcagtatagagatgtcagttttatggccccaaagatctgtgcattttataaatgtatttcagttacattttggcagtaaaagagcaggaagataatgcttccattaaagtgatcaactacgcatgcagaaattgggcaggaagatgtgtgaaaaaagcttttagatgaaacccattttcgtgtgtaaattgcctgtgctgcatatataactgtctcataatgctttggggtaattcagcaagtatagcactggaaatggtgtttgtctgctgatcttaatgaagcatataaattgctttataataagtctgctgctcagctgttatattacattaatctgctcttyttttctcctagctttttttctgttttcttaaacagttgattaaaattttaattaacttttgctatttcaactccgttttatttttcattcttaaaaggtattataagtaaaaacaaaaactcatttttgctcttctactacttgggacagtgtgtctttacgtttcagagcatttgtatttcaatagtcacgtcgactaaagatgaactatgagagaagcttaattattttccatatacttttggtatgatcttatctgactacattttaaattttatatcctagtaaaatccattttaaatcatatattattcagtacgaaatccttttataaatttcaaattgaaatttttaaaaagcagtacttatttcttgatgcattgttttactttattaacatgcctctaagtgcttctatatctcaaaaatatacagggattttttctttcctgtgcctgtcaattctcattaccttctttttgtttttttcctcctgacttttcacctgtactccacagatttcctcctctgatgctcctcttcagcctttggtatcctctccttctctgcaagctgctgttgacaaaaataaattggaggtatggtcatgttttaaccagctacattatgtagtgttaaatggtaaattaacttccttttgcagtgtgtcattcgggaacactataatagttgttgatattttgaatgatccctagaattaaaacagcaatttctagaatttttttataccacaggtatgattaaagaactttgaatctatatttaatttcagaatgactgatttattggtgccatggctgtatctcaacagttaagaagcagttagttttttgttgttgcgcccattactatcttatacttacaggaacgtttttttaaaaaaaattttctttctatgattctgttgttaaaagcacttaaagaaagttaatgtcaagtttcttttttttaagcaatagtaaacatcatacagataaaacgtgtattatgggataatgagttcagaatcatcaatgacaactgttagaatgcattttgggtggaagtggttagggtgcagatactaccactatgtatttttaaagtcatctgtacaaatatttgagagttttcatttcttttgactctttacctattttttttttttttttgttacattggccttaataaattagtttcaggcatcctttcaactatcattttttcccgtagacatgggataaatgataaatggttggctagatgtgtggtatacaaaggcaagatatagcccctgccctccaggagcttacagtctaaggcaagaaaacagataactatatagcagtttataatacaatatattatgggctgtgattgaggtacgctcactgtactgcaggaggcatcattttgatgcatcttatgctctgaataagcattagatataaggggaaggattaggaagaattccatacatggaaactagcctgtgaaaaaacatatgggcaaagtgcagtgtttggggagttgcaagtagaatggcataactgaaatatgagtagaacggcaaggctcctatctttctcatgaaggagccttctcatgagcccactgaaggagtttgattctgaaggctcgggcacttgagtgatgagttttaagcgttggggggtgggtgtgacagaatcagattttcatgttgtaacacaactttacaggctccgtggggagtgaattttgtggtcatgggtgaggaaaagacttaacctattactctaatccagtaatgaaatgagggggacatgttccaaagtagtaacagagggaatgtaaaagagagtgtaatttttaaattttattttattttattttatttttttgagacggagtcttgctctgttgccaggctggactgcagtggcgcgatctcggcttactgcagcctccatcacctgggttcaagcgactctcctgcctcagcctcctgagtagctgggactacaggtgcgcaccaccatgcccagctaatttttgtatttttagtagagacagggtttcgccatgttggccaggatggtctcgatctcttggccttgtgatccacccgactcgggctcccaaagtgctgggattacaggcataagccactgcgcctggccaagagagtgtaattttgagaggtcttaagaaggtacagtctatggggtttagtaattggtgtcttgtggaggtgctttgggaagcttgtgacttccagtttctatcttgaacatcttagtagatgatggtgccaattagtgagacaaggatacaagctgaaaagaaggaacaggtttgagcagaaaaggaaagaggtgaattagaagttggacgtgttaagtatgaggtcactgtggaacattgaggtgtttagtagttggttggatatacaggtctaggcccatgggaaagaaaaggggaggagagtagttagagagagagagagagagagagagagagaaagcttaaaaattttggaaactatgtctttattttatttttatttatttatttatttatttttttgagacagagtttcgctcttgttgcccatgttggagtgcagtggcgcgatctcggcttattgcaacctcccactgcaacctccgcctcccgggttcaagcaattcttctgcctcagcctcccgagtagctgggtttacaggcatgcgccaccatgcctggctaattatgtatttttatagagatagggtttctctgtgttggtcaggctggtctcgaactcccgacctcaggtgatctgcccacctcagcctaccaaagtgctgggattacaggcgtgagccactgtgcccggccctatgtctttatttaaatcactcaagtatagtttgattataatgaacccagtatgtacttacctccatcttactggacttgaatgtttaaccagttttcttgcacaggaggtcagctgtttcactacgtcacttgtgcatatagccaccaggtttcaagaacgactattttaaaatataaaatactgcagtattttgttcttgctgagaaaatagtttaaaacaacttaggttttcacagtacttttagatcttttagcagcttttgattctatggatgggagtcatctgtgggtcaaactgcatgatgagtttagaacccatgctgttaatattacttcgaagcctgtatcctaataccactgccagaatcagagtaggtgacagctatatttttattattgttattatactttaagttctaagatacatgtgcacaacgtgcaggtttgatacataggtgtacatgtgccatgttggtttgctgcactcgtcaactcatcatttacattaggtatatctcccaccaccccacgacaggcaccggtgtgtgatgttcccygccctatgtccaagtgatatcattgttcagttcccacctatgagtggaacatggggtgtttggttttctgtccttgtgatagtttgctcagaatgatggtttctagcctcatccatgtccctagaaaggacacgaactcttccttttttatggctgcatagtattccatggtgtattgtgccacattttcttttcttttttttttttttttttgagatggagtttcactctgtcgcccaggttggagtgcagtggcacgatctcagctcactgcaagctctgcctcccgggttcacgccattctcctgcctcagcctcccgagtagctgggactgcaggtgcccatgaccacacctgtctaattttttgtatttttagtggagatggggtttcaccgtgttagcccggatggtctcgatttcctgacctcaktgccacattttcttaatccagtctgtcattgatggacatttgggttgtttccaagtctttgctattgtgaatagtgctgcagtaaacatagatgtgctgcatgtgtcttgacagctgtatttttacagctgaattctggtgttaaagagtatcaagtcatgctctccctctagtaaatgtagcaagcgaatttgatttgtttttagtgatttcatatgtgcccaccaatcatggtgattaggaagtcaaacttctttcctactcatgacaatggccttcttgagaaataactgtcttcacctgtgctggctactctaacactataccatagattgagtagcttataaacaacaaaaatttacttctcacagttctggaggctggaaagacaaagatcaagtctccagcagattctgtgtcttctgaagggtccactttctggttcataaaacgatacatctttgtgccctcatatagtgggaaagggcaggaaatctctctggggcctttttaataagggtgtgaatcctattcatgaaggtttcatcctcatgacttaatcacttcccaaaggccccacctcctaataatatcacattggggattaggttttaacatgtgaattttggggtggacacaaacattcaaaccatagcaataactaatagctctgagaggttagggagcaactcgttctcaacatatttttctttttctttttttttttttgagatggagttttgctcttgttgcccaggctggagtgcaatggcatggtctcagctcactgcaacctccgcctcctggattcaagtgattctcctgcctcagcctcccaagtagctgggattacaggcgcccgccaccacgcccggctaatttttgtatttttaatagagacagggtttcatcatgttggtcaggctggtctcgaacttcgtgataggcctgcctcggcctcccgaagtgctgggattacaggcatgagccaccatgcccggcctccttctcaacatattaatgaaaatgttctgtcacattgctttctgcaccatagtttactacgaatatatagaaaacattttataatatatataaaatttttgcacatcctatttattctttacttataaaatggggataatattactaacttcataaagttgttgtgaggattaaaagagccaaaacagtgcctggcacatagtaacggttcagaaagtattagctgttactgtaaggaataataacagcaataataaatatcaaagctccactggaccacagttagtagtgagacctggaagtttgggctccatagtccctcagtcctgctactagctttgattaactgtgttgctttgggcattacttcttaagattttgtttcttcatttgtaagatgacagtaggtaaagtttttatttcagaaaattgttgcaaagattaaattagacaataaggtgcttatcacctggcccataggaagcacttaataagtggtagttgtgttttggaaatgaaggttttgatttgggaaatggttgagtcagcagtaggtaatgtttctagttatccttaaagggttacatcttccttatttccagtataaagcccaggcacttgagtagatatgaagatcttttttgagaactatcccaactttctagatggtcttctgtctgtgctagactatgttaatatccttaatgtttaaggcaaaatgtcacttttgacatatgctcttctggtaactaaagcatatagattactcttcaggttttagcacaagttcaactttatgttgacttttatcctgttcctgaacagcattattgaaacataattttagagaatcctagtctaaaggagcctgatatataaactgttcagattctggaaattctatccatgtattcttcttttgttgcaaagcaatataccaatagtttgttagctttgtcctctacttaaatgctttcactaattgatgaattactattataacacttactgccttttattaatggctaataaaaggttaaaaagagaaatgctttagaatttccctgttcttaaaattgcagttgaagacattgcttattcatgccccaaatataaagatctttgctatgaatttcttttaaaattttgaactaagatgtaaatttttcctttcctctttttaaaatcacacaacaaacactaaaattataatgtgccatatttgtgtagtgctttatagtttgcaaagttgctttctaggttcttagtgcctttttctttttagtgttgaaatgcacattaaatatatatctggtttaatacttagaagactatcactgtgtaatgaatattgaaactcaatgttattaccactttgaaagctcctgtgtgactctgttcccaaataacctcatcccttctccttaaaggtaattaacatcctgatttttatcatcatcgtctttacttttttgctttttaaaatagttttatactagtgtgtaccctcccaaacatcatatttttgcctgtttttgaactttatatgaatggttgcaaagccctttgaacttttattatttctctcacattatggcctgggaattgccaatattatatttcctgatttacaaatggcagatttactttgacagaggttgcatcagacaccattttaaaggcataggtacaaatgcagctgttaggtattttgagtaagttctgcatgtttatcatgttgccttccctaggttcatcagtttatcttttctttttttgctgccaggaaactaagggccaggttagtgtttagttgcagtagactttcagttctcagtttctagtcatctctttcctctaaatgccttacgaatgctctttgtttaatctcttttcattttcctctattggcccttaagatttattgttgatacttttaatccttaagtttttaacattatatctaatccttattggaaatgcaaattgtgaatatcataatgccatttatacttcactgccttacactagtcagttggctgtggtccccaagcactatcttgaacattatttttttcatgagaaaatcactgtatttactcctttttctaaagcaaaatctatgataatggactgaagatattttgtgataaaaaaagctgattttatagtcttccccttatatttgcctattataatttatctttgtgtaataaagaagtctgttctatcacttagttttttttttttttccattcaaaattcaacttcgtgattgctgttaggaagtctaacctaataaaaggatatagtgagaatttattgaatggagatctcattcatttaaaacaagcatgaaacaaaccctactatatcaaagaagttctaaattgtcttaccgctgtgcctctgtcttaattttttaacagatattctttagtgtcatcagcatataacctcaatgagaatatgaatttactgtttattatatttcagtagcacgtagatattgtaattactgaatatttctacctttttcagatgattactcaaactaataaggatgagtcaaaaattgccattttttaaaaaagtaaacttatcaaaactttgggctgtgttttagaaagaaaaggaaaaaaaaaaggaagagaaaaagagagaaaaggagccagaaaagccggcaaaaccacttacagctgaaaaggtaaaattctttttttaaaaataatctattaggattaccattttatttgtatacttatatattaatgactttctggatatttataatatgtaaataatcattattttcaacaagcaattgttgagtgaatgctgtgtgctcagcatgtccttctagcttgtctctgtattatttgtaatcagttatctatatgtgtgggtataaaccctctgagttccttggagacaggtattctcctgtgaatgacatagagaatggtgtttttagctttcatacacaatcagacttagaagacttagaattttagagaatgaagagaacataaatgaaagggacttcagaaaagactctgcttaaggttagcctttgagctacctcttaaaacataggtaggattaaggtggaaaacgggtacatgtttaagagaacagcctgaagaatgtatgaaaattgtaaataaaatgtttagaaaaatagtgaatttgaagaaagggatttgtctatgtatagaaactagtgaaaaataacaccagaatggtagattgaactcaaattgtagatgtttattcttttggggggaggaaaggctgtgagcagcacttcaaattctaaagcacatggtactcctaattcagaagggtttttttgaaaattattttagcagtgatatgcaggatagatgtgattaggcgaactacagctagtgagaatgttgtactttgtaaagggattggttaaatatttatggtggcttggctttgaatgcatttcatcataagagtatggaatcatactaagagaattgtcagtaaagggagcatccttgattttagttgttgaaattttaaaaatcaactttattgaggcataaattggatactgcaaagtacatccatttaaagtacataatagaagtactgtatataagaaagaagatccattctgctgttgaacatttggattatatacaggttttaactattctaaataatgctgctttgaaacttttgtatatggaatctaagcttgtatgtttttagggtgacttagtagtggaatttctgcatcataaagtatgtgcatcttgaagtttactggataatgtcaaacttttttccaaagtgtataccaaaggtactcttaccatcaaagtaatttcacattctatgtaacacatagtgttgtcagggattttagcatttgcaatatggtgagtatgtaatggtgtctcattaaatttttactgttcatttccttgattacagaatgaggcccagtgccttttcatgtcttttttgccttctttttttcactatagcttcatttattttacatttaaaaaatgaaaataatacatgtgaaaataaggcacgtgttttttaaaaagtgaaactttaaatggggtgtgatggtgcacctctgtagtccccagctacttgggaggctgaggtgggaggatcacttgaacccaggagtttgaggctgcagtgtgctatgatcatacctgtgaatagccactgcactccagcatgggtaacacagcaagacaccctttaaaaaaaaaatacagaagggaataaaaaacaaaaatcttccttttcataggcctggttcaggtcttttgcctatttttctgttggattgcctgcttttcctcattgatttgtagctctctatacacatatacataatgtatgggagatactagtcctttttcagttaagtgtttgcaaataccttatttcttcattgtgtctaattttgtttctgttttcattttaattcttttattattatactttaagttctagggtatatgtgcacagtgtgccggtttgttacacaggtatacatgtgccatgttggtttgctgcacccatcaacttgtcatttacattaggtatatctcctaatgctgtccctcccccagccccccaccccctgacaggccctggtgtgtgatgttccctgccctgtgtccaagtgatcttactgttcaattcccacctatgagtgagaacatgtggtgtttgactttctgtccttgtgatagtttgctgagaatgatggtttccagcttcatccatgtccctgtgaaggacatgaactcgtccttttgttatgactgtgtagtattccatggtgtatatgtgccacattttcttaatccagtctatcattgatggacatttgggttggttccaagtctttgctattgtgaatagtgccacaataaacataagtgtgcatgtgtctttatagtagcatgatttataatcctttgggtatatactcagtaatgggatggctgggtcaaatggtatttctagttctagatccttggggaattgccacactgtcttccacaatagttgaactaatttatactaccaccaacagtgtaaaagtgttcttgtttctccacatcctctccaacatctgttgcttcctgacttttttaatgatcgcgattctacctggcgtgagatggtatctcatcgtggttttgatttgcatttgtctgatgaccagtgatggtgagcattttttcatatatctgttggctgcataaatgtcttcttttgagaagtgtctgttcatatcctttgcccactttttgatgtggtttttttttcttgtaagtttgtttaagttctttgtagattctggatattagccctttgtcagatgagtaaattgcaaaaattttctcccattctttaggttgcctgttcatgctgatggtagtttcttttgccatgcagaagctttttagtttaattagattccrtttgtcatttttggcttttgttgccattgcttttggtgttttaatcatgaagtccttgcccatgcctgtgtcctgaatggtattgcctaggttttcttctagagtttttatggttttaggtcttacatttaaatatttaatccatcttgaattaatttgcatatgaagtgtaagaaggggatccagtttcagctttctacatatggctagccagttttcccagcaccatttattaaatagggaatcgtttctccatttcttgtttttgtcaagtttgtcaaagatcagatggttgtagatgtgtggtgttatttctgaggcttctgttctgttccattggtctatctctctgttttggtaccagcaacatgctgttttggttactgtagccttgtagtatagtttgaagtcaggtagcgtgatgtctccagctttgttctttttgcttaggattgacttggcaatgcgggctcttttttggttccatatgaactttaaagtagttttttccaattctgtgaagaaagtcattkgtagcttgatgaagatggcattaaatctataaattaccttgggcagtatggccattttcacgatattaattcttcgtatctatgagcatggaatgttcttccatttgtttgtgtcctcttttatttcattgagcagtggtttgtagttctccttgacgaggtcctttacatcccttgtaagttggattcctaggtattttattctctttgtagcagttgtgaatgggaattcactcatgatttggctctctgtcattgttgtattggaatgcttgtgatttttacacattgattttgtatcctgaaactttgctgaagttgcttatcagcttaaggagattttaggctgagacgatggggttttctggatatataatcatgtcatctgcaaacagggagaatttgacttcctcttttcctaattgagtaccctttatttttttctgttgcctgattgctctggccagaacttccaacactgttgaataggagtggtgagagagggcatccttgtcttgttccggttttcaaaggaaatgcttccagtttttgcccattcagtatgatattggctgtgggtttgtcataaatagctcttattattttgagatatgtttcatcaatatctagtttattgagagtttttagcatgaagggctgttgaattttgttgaaggccttttctgcatctattgagataatcatgtggtttttgtctttggttctgtttatgtgatggatcacgtttatcgatttgcgtatgttgaaccagccttgcatcccagggatgaagcccacttgatcgtggtggataagcttttcgatgtgctgctggattcggtttgccagtattttattgaggattttcgcatcgatgttcatcagggatattggtctaaaattctctttttttgttgtgtctctgccaggctttagtatcaggatgattctggcctcataaaatgagttagggaggattccctctttttctattgattggaatagtttcagaaggaatggtactagctcctcgttgtacctctgttagaatttggctgtgagtctgtctggtcctggactttttttggttggtaggctattattgcctcaatttcagagtctgttattggtctattcagagattcaacttattcctggtttagtcttgggagggtgtatgtgtccagcaatttatcattttctagattttctagtttatttgcgtagaggtgtttgtcgtattctctgatggtagtttgtatttctgtgggatcagtggtgatacccctttatcattttttattgcgtctatttgattcttttctcttttcttctttattagtcttgctagcagtctattttgttgatcttttcaaaaaaccactcctggattcattgatttttttgaaggtttttttgtgtctctatttccttcagttctgctctgatcttagttatttcttgccttctactagcttttgaatttgtttgctcttgcttctgtggttcttttaattgtgatgttagggtgtcaattttagacctttcctactttctcttgtgggcatttagtgctataaatttccctctacacactgctttaaatgtgtcccagatattctggtacgttctatctttgttctcattggtttcaaagaacatcgttatttctgccttcatttctttactcagtagtcattcaggagcaggttgttcagtttccatgtagatgtgcagttttgaatgagtttcttaatcctgagtcctaatttgattgtactgtgtcctgagagacagtttgttgtgatttctgttcttttacgtttgctgaggagtgttttacttccaattatgtgtcaattttagaataagtgtgatgtgctgagaagaatgtatattctgttgatttggggtggagagttctgtagatgtcttattaggtccacttggtgcagagatgagttcaagtcctggatatctttgttaaccttctgtctcgttgatctgtctracattgacagtggggtgttaaagtctcccattattgttttgtgagagcctaagtctctttgtaggtctctaaggacttgctttatgaatctgggtgctcctgtattgggtgcatatatatttaggatagttagctcttattgaattgatccctttaccgttatgtaatggctttctttgtctcttttgatctttgttcgtttgaagtctgttttatcagagactaggattgcaacccctgtttttttttttttttaactttccatttgcctggtaggtcttcctccatccctttattttgagcctatgtgtgtctctgcaggtgagatgggtctcctgaatacagcacgctgatggtratgggttttgactctatccagtttgccagtctgtgtcttttaattggggcatttagcccatttacgtttaagtttaatattgttatgtgtgaatgagatcctgtcattatgatgttcgctggttattttgacctttaattgatgcagtttcttcatagcatcgatggtctttccaatttggcctgtttttgcattggctggtaccagttgttcctttccatgtttagtgcttccttcaggagctcttgtaaggcaggcctggtggtgacaaaatctctcagcatttgcttgtctgtaaagtattttatttctccttcacttatgaagcttagtttggctggatatgaaattctgggttgaaaattcttttctttaagaatgttgtatattgacccccactctcttctggcctatagtgtttctgctgagagatctgctgttagtctgatggacttccctttgtgggtaacctgacctttctctctgactgtccttaacactttttttttttttcatttcagccttggtgaatatgacaattatgtgtcttgggttgctcttcttgaagagtatctttgtggtgttctgtgtttttcctgaatttgaatgttggcctgtcttgctaggttgggtacgttctcctggataatatcctgaagagtgttttccaacttggtttcattctccccatcactttcaggtacaccaatcagacgtagatttggtcttttcatatagtttcatatttcttggagtgtttgttcatttcttattactcttttttctctaatcttgtcttcttgctttatttcattaatttgatcttcaatcactgatatccttccttccacttgatcaaatcagctattgaagcttgtgcatgcgtcacaaagttctcgtgccatggctttcagctccatcaggtcatttaaggtcttctctacactgtttattctagttagccattcgtctaaccttttttcgaggtttttaacttccttgcgatgggttagaacatgttccattagctccgagaagtttgtgattaccgactttttgaagcctacttcagtcaactcgtcaaagtcattctgcatccagctttgttctgttgctggcgaggagctgtgatgctttggaagagaagaggggctctggttttataattttcagcttttctgctctggtttcttcccatctttgtggttttatctacctttggtctttgatgttggtgacctacagatggggttttggtgtggatgtcctttttgttgacattgatgctattcctttctgtttgttggttttccttctaacagtcaggtccctctgctgcaggtctgttggagtttgctggaggtctactgtggacgctgttttcctgggtgtcaccagcagaggctgcagaacagcaaatattgctgcctgatctttcctctggaagcttcgtcccagaggggtacccacctgtgtgaggtgtctgtcggcccctactgggaggtatctcccagttaggctacacgggggtcagggacccacttgaggaggcaagtgtgtccattctcagagctcaaatgcagtgctgggagaaccactgctctcttcagagctgtcagacaggcacgtttaagtctgcagaagtttctgctgccttttgtttagctatgccctgtccactgaggtggagtctatagaggcagtgagccttgctgagctgcggtgggctccgctaagtttgagcttcccagccactttgtttacctgctgaagcctcagctatagcggatgcctctcccctgcccagctgcggcttcacagtttgatctcagactgctgcgctagtagtgagcaaggctctgtgagcgtgggacctgccaagccaggcacgggagagaatctcctggtctgccggttgctaagaccttggggaaaatacagtatttaggcaggagtgtcccgtttttccaggtagtctgtcacagcttcccttggctaggaaagggaaatccgtgaccccctgtgcttcctggtgaggtgatgccccgccctccttcagctcaccctccgtgggctgcacccactatccaaccagtcccagtgagatgaaccaggtacctcagttggaaatgcagaaatcacccatcttctgcgtcgatcatgctaggagctgcagaccggagctgtcttggatgaagatccacctcgttatgagtttgaaagaagatgctcgatagggattatttattctagaattagttttttcaagtcaaatttatttctataagtaattaaagccattaatatagttcttgacacatagtaatagcttaataagcagttaaacatatttgggatttggaaggaaccatgcttatctcatttaagttccttattttataaagaagtaaactaaatcctcgaaggacctaaagtctctcaggagtgacttgctcagtgttactagttgctggcagctcaggaatttgaacccaagtcttctggtttcaagccctgtgttgtgtgtgtgtatttctatttgtcatatatgtcttcaggttctttattgcaatttaaagtgctgttgtacattctacataatttataatgaattatccaggcttccctgtaaaagaactgtgttcatatataacctcatcccatactatgctaactagggaattaataactttcattgatttgtgagtttccagttagcaacttcttccttctgtaaacttgttttccttgagcagtctactacttttgtttaaattgtattttgtttatacctaagtctcattgaggtttacatttttgtagtgttccagaaactattactaattgtgtcagttggagctaggcttactttttttctgggaggagaaaggtaaaacctaaaaatgtaatgagtcaagtgactaataaggcagatgcctttgatatttaaatagatatctctcttttatgcttaagatataccagtagaaaattgtgtgtaaatttcgttttttctaaaatactctgtcattcactggacatttctatttaattcacttagtttagatttatgtaccaggttgtctctcaagtaatcaatgatctataaatatgtttctgtagatgaggagtactctattaaaggaatgttatatgagttatctttcagtttaatcagattttaatttgtcctttggaagtttctaagttttataggttttctcaaaggtttacatatcaaagcatggaacatgcaaaataatcttttctttgctgggaaaagaagttaagcctttttaagatgattgctactcttttctggttatagtactatttattacaacatgttatatatacaggtgacactagaacagtgctggagttgtggcccttacccccactgtgccgttgaaaatcctcatataacttttgattcctcagaaagttgaccactaatagcctactgttgattggaagccttacaaataacataaatagtcaatacatattttgtatgtcacatgtattagatatattcttaattatatattatatataagaatatattcttaaagtaagctagagaaaatcagaaagaagagaaaatatatttactattcattaagtggaagtagatcatcataaaggtttttatcctcatcgtcttcatgttgacttgactgagggggaagaagaagaggaggtgctggtcttcctgtctcagaggtggcagaggtggaagaaaatccacatgtaagtggatccacgcagttcaaacccatgtcgttcaagggtcagctgtacttattatgtattcagttctgaaacttctgatcatgtgttaagaaatctgtaatgtaggaatcagcaaacttttttctgtgaagaaccagatagtaaatattttaagctatagaccttaatgtgtctttcacaactactcttttcttatagcataaaagcagtaagtgaatgtgttccatgaaaactttatttttaaaaacagatagcccaatttattgagacacttccttccccagctccttacagtgagaaacggttgccgcggaagaagcagggtcaggtggagagccaggctccagctcctgatccatcagtcacttaactgtccagagcctccttttctttctttattaagtgataagatttgcctcgatgatctctagagcctcttttgccaatacatagctttaaatttagaattgcttgtttcgcctattgaacatagggactgattccaaacatcatctaacagtatccttaaaggtggatttcagatagctrcataattagtttttattcagtgacttttcctcactattatttcaaactggtttctcgcctacattagttactgctctctttaatcaggttttttttttttctgttaaaacacaaagtctaatttaggagaaaatagaaccatttatttctagtgcaggctgtttccctgtgtgtgtgtgtgtgtgtgtgtgtgtgtgtgtgtgtgkacacacttactggtttcttgcatatatgccttggtggagtattcttagtttaaaatagattgttttcattggcatagagtccctaaagtatgtattgtgatattttttaatgtaaaataatgtctcttgtgcagatatttgccattagcttcttgacgtttttaagagaaaatcaattcacaaagtatataaaagtagaataaaaattccaggaaggaaagtggagaagcagtgacgctataagagaagaccactgcttttgataatacatacttaccagcatcaatacatttatttcaagatacggcaagtatttgggtatttaaggagataatgtagatgaataatgatttaaaaaaaattagttgggaaagaaatgaaaacaaccatcaaacttcctcattgaacaaaccttttatgttaatacaatttaaaaaatacatttgtatttgataaatatgtcagctaacctattaatataagcacaagataacaattgcaaatctgttgaacttgaaatttcaatataaccatgtaaaagtgacaaccacttgtaaatcaaataaattattcttagtaaatcattaaattaaatggctcattgccagatgctagattgataggttatgttgtttaacaatctgacagatacatttacacacccaccaagctctcattgtaatttaagctaaataaacctttcatatgatgcgtgaatgcattttagaacaagatattttcaataaataatacttttataaaaatcatagaaacatggtataggtgagtaaatgcagcagatgtctcacagaacatttgtataagtagttttggaagattctttatattttcctcaaatctttacatttctagcttaaagctagatcttgaagattagtttgatgatgatcttttgtttatagatttttaaaggaaataatagattcagtatcactatatattaggtttaggaagcattttagtgttgcttccctgttgcccaagttttattatggtatagaatgctagttgctgttaacaactcctcatctttctttagctaggaggcattaaaaaagaaaaaatctttttcctctgaagcaggaaagattacagtgtagtacccctcagtaaaaataaataatctgtcttgtttggtaaatgtatagggtttcttattctttaaccaagaaattggtaaatgtatgtttcctccaagtgtattttctttcttttctttttcttgagatagggtctttctgtggggctcaggcatgcgtagaactcctgagctcaaaggatccttctgtctcagccttctgcacctgactagctgggactgcaggcatacaccaatgtgcctgtctctcctagtaggtttttgatagtctctttcttctgcttccccataatattcaaaccatatacatttgtaagaagtcacaaaatccatgtaagcaagaagaaaaaattaatgttaccacttagaaaaaatgatcactaatgccttggcattcatccttcctaattgtttcccatggaaatatatatatccacatgggatcatattatacatattattttgtaacctactttgtccctttgtcatttgacaatattttgactgacttttctttgtttttttcttttttagatacagggtctcactatttcattcaggctggagggcagtggtgtgatcatagctcactgtagcctcaaactgggcccaagggaatcctcctgtctcagtcttccaagtagctaggactacaggagcatgccatcatgtctggctaattttttaaaaagtttcttaaagttgaggtctcattgtgttgaccaggccggtcttgaactcctggcctcaagtcaggcataagccactgcacctggctcccctttttttattgatacatatactgtgcctttctgtctttactaacattccatcaaatggatgtagcataatttaccttccactgagcacagtaagactctacttaaagtttatctctctttgggataatgaaaatctgtatacataatctgtgtacaactgtgtaataacttcttacaatcaatttttaaaactggagttgctgagtcaaaggataataggcttttaaaagccttttgaaaaatattaacaaactactaaaagatgcagatagaagaacctatacttgattacaagactttaatttgattctcaactttactgtttactagatgtctaactactctgtgcctcagtttcttcatatgtaaatctttttggacatttctgagtacctactacatgccaagtgctatttttggcattagggatagagtggccaggaggctgttttgtttcttgtaggatgttcagcagcatcttaccagtcctaacagtaaaaagtgtcttcagagacattgttaaatgccccctgggaagcataatcacttctcacttgagaattgttgattcaaaatctagatccatgaaactgggtctcgatagaagaatgaaaacctgcctgttacgcgatcctcgggagggcaccggtgagatcagtcaaggcttcctttgaatatagttgtccttcagtacccgtgggagatttgctccaggaccccacccctgctgacacacacacacacacacmtaccaaaatctgtggatattcaagtcccttatttaaaatgacatgatttgcatataacttattgcacatcctcccatatactttaaatcatctctagattacttatatagtaatacagtacaatgcctgcagatccctttattgttgtggattcagtgtagtaccctgtcatggcaaattcaagttttgctttttggaatttgtgaaactcatggaaatggagggccaactgtatccagtagtccctctcatatctgcagagaatatgtcccaagatgtagccagtgaaaccttgggtcgtaccaaatcttgtatatactatgattttgatctgataggtgagatggctactgagtgactaacaggtgggtagcgtataaagcgtggatgtgctggacaaagggatgattcacatcgctgggacaatatttcatcatgttactcagaaccgtgtgtaatttaaaacttatgaattgcttatttttggaatttcccatttaatagtttgtgactgtgattgtaggtaattgaagacactgaaagcaaaacgttaggtaagggggactgctgtagacacaagatctttttctcaggttttactcggatgccagaaggaaataatatagttgtgtatatgaagaaaagttttaataccattaggtggaaagtaaaatacacgatcgagtgaatcagaaattagcgttttcttaattataagttatccaaagtcagatttatctttcaaaatcacacatctttttatctaattcttatttgattagaattatctgcattttggaggaagaaaacagaacagaatgttaggataaaaatttgattagacatgtagtcttgagccacagaaaccattggcctgtagccgtacactttgttattcttcatcttctggaatattacttttgtggtacttaacaatagtttttctagagtactgcatttatttgaaagtattgcagtgccagaaaaactggagacaggaaagaaatattttaacttcttcaaaacttagtagggacctgaatacagggagaaattataagctaaaaaattaaaagataatcaattgcttacagaataaatattaataaagcctagccctttcagagtctgtccattacctatgttttcacctatcatttcatttcagtttattcttttgaaacctatgaagtttcagggaaccggaatagagactgtcttctgaacatggcattcttattcttgtctcagtagctctgatttaattctatactcgtgcccccagtgtgtctctcctttctacataacaaggtctacatctccttctaaatctttatcactgtgataattatgttcagcctcatttctttttttttagcagttttcccttattataaaaactgtggaaaatagaggaaaaaataaaaaggaaaatcaccttacatcttactgcctggagtctcaccacttttaacattttagttgtttctagttctcttttgggaatgtagatggtatggtttcgtattttttattttttctctcacccccaatttaatgttgtattataagcatttattttacctttaatggtaatgtgttgtactggcctatgatagtgtaggaggtgggggtatgtcacaggcttctggagagtacccagcaagggtttgcttctccaactgagtaaagattacctaccagttaataaatgggaataaggatattttatcttcccatttattattccatccttacaagtgagaacagcaatgaattgaaaataaaataggcttaagttatacaaatatatttgcataatatattttgtttaaatgaataaatataattctgttagatgcttctcttcaccaaccacttacatactgtgtaataaactaccgagagtaattaagggtttaatattatgttttcataattattcaaaatttttaaatattaaaatttgataaatcattttttaccttctcttcccctactccctccctctcacccatccccaccacaataaaactagtgcagaaggacgtatatattgagccttaaacttgtagtgttctagatgtgttaatatatgcttcctttggtaatatttgtcttttaacatttttaaaaaaatattttaaatgcacaaaatctcccagaaaatttttaaaatctgttaaataaacaatacacataaaatggttaagatggtaggttttatgctatgttgcacaataaaaaattaataaatacagttttaaaaagatacattgcagacatatacaattttatctttataatccaattttaatgagttgaaaatcattttttctgtttaatccttaattcatctggtagcatttaactgaaggaaataaaatttaacctgaaagtaaaaaatgtgcagcgatgaaaggagatgtctctccactaacatgggaggcatccatgttctatttttaaaaatgattgcacctatttatagtaaagcatcttctggccttgggagtttctagtctccctggtttgctgcctgccaaaagatggctgttctgtcttttacagttgcctctttcctaggtttatggcctcctactatcagcctggacccattactgacccatcatttgacattcttcgttgtggatcggaagaaatagagactctctcttttgatagcaatgataattgagatattgcatcaaaagtatcaacaatggcttttatgtatggattttgaaaatcagtcttatcacttcatagttacctgataggaacatctgtagactctgatgagaacattgatagcagtggatgtaataatcttatagagactactatgcagccctggtttttttccctgtgccaatgctctcaagacctttcatcatttgaaactttcccttttagatttatagactgcatagctttgatcagatgtcattagagccttcagctctgtgctgtgttttacatcctattgtttcctttcgtctgaatttagtctcctgagtataccatctgatttcgtcctgcctacccacacttagccctcctctttttactgtataaagcaggccttaggactaaggaggcattgctcttctagccactctgacattcagtgtgacttgaagagtgaggctgaaaaaagcaatcttaagaaggatttggtctgacagtttgttcttgagattggtggtagattaaatgttaccaccgttttacatttgtctcattttatagtgaactatcagtcacacttaccatcttatcaacacactgtgttgttagcttctgtacattgctaaatgtttacctatcatctagggatagttcagctcataaagggtcaaatgaataggcaaaggatggacagatatggaactagctgtgtttttcctactcagaggttagactggagcccagcttttaatgacaaagataatcttagcattttataaaatttatctgctgtaggtttgttcctgaccttggcattgctcacactaattgctcgtaagtggtactatgctgattaaataaatatgttcctttttagtgtcttatctgggtacagtaatttactgtcccaaggattttttgtaatgctaaccaaaatgttaaggtagaatacctacccagaggaccaaaactataggttaacattaaagtctaatttatttgaatgtagttgtataaaatacaatacataaaattgaacagtaaattacctttttagtgctttatgatgggcagtccaattgtgtaagttaccttggcagtcctgatggttggcccataacaattgcataaaatatttgtggaatatgatactcttagtaaaggactatgtatgtaagatgtgtgagaagcataattatgcaaaaaacatttttaaggtcctctttagaaagaatactttttttggcggggggagtggggcagattgccgagcaggtgacctatagctagaaaggagagaaaccttccatgtggcatctaaaaacttttaattctgtttcatgccccaccccactgttgatagtggaatgtagggattttaaagacaggatggttcccttgagatgaaataagctcaaaaggcagttagactgaaacaggatgattgctgtcaatccccatacactcaaggtgtttttttttaagtttacatagacatatgtttatatttgcatatatgtatttgtgtatgtttgtgtattatttaaggaaatgcattgaaaggtttctgggaggaaatcttgggattgaatgtagcaactcttaggatgcctgcagtgtgtaaggcaggctaaagggttggaaggaatataaaaatgatgaaaacagcttaccctcaagaatcttaaaattcagaaagaactagtgattaaaaggggatgatatgataaataactctagcaaaaggcagatatgatacaataggagacagagtgtggaggtttggagaattgagagatatcatgttgagattattaggaaagtcttcatggaagttgtttatatttgacatgagctttgaaacattgttaggaggagagagcaacaggcagagagaagaagaacattaaaagaatggaaattgtaaggcatattttggcaattatccaatttaactgaagtataggacaataatggagtacaaaccaataaagataatattgagagagccttaaatttcgtgataaatagtggattgtttctgattttgagtggggaagtatacttcattttagtaagatgaaatcctggctgtagtatgtaggatggattgaaggcaggtgaggttagaaaaagagaaactagctaagaagctatgggagagagataattggagcttgatgtacagtcctatttataaaggtagattagcctaacctgcttctcaaagaatgattgaaatacttttttactttgcttttgaacaaacagccttaccaaactccaaggcctgctttatcagattcatttatttattcactgagtgagtttttattgagcagtcactgtatgtccagcactggggatatagtagaaacaaaacaaaatgtcctgctgtcacatataatcatttcaaacatatatggtgctttatcaataaaaggtattagtgtgattgttagtagttgtcactaccactgctttatgttaaccaaaagcctaaaatattattttgccaactctgtattttatctcctagaagattttttaaaactaatgattaggcgttaaactttatagcatttaaagatttaaagatttagtaatttgtttttaatgacagcatttataacaattataaaagggataatatataaaatgaacacaaaagaagcaaatgtctatttcggatatatttgtgatttatggacattgcattgcatctaacaagtccccccagttccatctcttcccacttccaatcggtagattttagtgacaggacccctttcccagaagcagtagctctccaactatattagaaaactgtattagaatatatatatatatatatattttttttttgccatattctctgcttcttaactactaaccctgctcaagccgcacattattattctactgaatagatattagttcattgtccctatgttttctcaccacaccttaggacctttattgctttagtattgtagactttaaatttctggaactgattgctagaaggaaaagcaatccttttttcatagttgatttaaaaacatctaaggaaagatcaatttgaggttctttgattcttctgatctttggaaagttcaaaagtggtttgtataatcatagttccttgcagtgatacaaaatagagtcttcttttctgcaagctcttatccattgctttcagaaaactgggactttttctcttcaaacacagctgtggactaaggtcttccccttcattaaaaagtcccttttaaatgacaaccaaatagtccaggacttattgagagtgttctttgctttaaaaagtttgtttttattgttatcccctttgtgattgtacttctgagttctcaaagatgttcacagagttttctttggccccatctctttgttgattttaaagaggggtcaaaaaatgaatttggtatttattttgtacaaccaggctgttttgagttccctgaaaaccaggtagaagccaatcaaaatctgtaaggggctaaagggttacccttcaaacccatttccaaagactaaggattgagaattttagaaattgagaattgtctttgaaacaaaagcaaatcaaaagcagattttggatttgaaattagaactcttgtttcattagatgaaaaagtgtatctccagactaaaatagccaacaatgaccttgttagatttgtgatttgctgctcaagaaccgtcagcatcaggcatttctttccattcccatttctccattattttcactttctcctctttctaaattctacttttgaatattcaagtaattttagagtttctggagtgtatcaaatcttctttataatgaaaacctaactttgggaggttgaggcgggcggattacctgaggtcaggagttcgagatgagcctggccaacatagtgaaaccccgtctctactaaaaaattacaaaaaaaaaaaaaaattagctgggcatggtggcaggcacctgtaatcccagctactcaggaggctgaggcaggagaatcacatgaamccaggaggcagaggttgcagtgagccaagattgtgccattgcactccagcctgggcaaaaagggcaaaactccatctcaaaaaaaaaagcctatttctggggttttcatattatgctattttgccacatacaaatgtatttgcaagcaaaatagaataaagaaggttataacggggaattcttttaggaattggtatccaggaggtacttttggccttgaggcaggatgttgaagtggagaggtttctttatcaaacctgcttcccgtagtcatctctctcttctttcctggctttctatccctcttttccttcagatgagatagtggagctgggctgggggatgctaaatttgtggtaatggaagactgtccctgtagagtgttggcattcctcaaactggattggaatatgtattcactgctaaagtatggtcacagcagcctttttatttccagtttacaggagaactgtgctagtaacgtttccccaatttaaaatttttctacgatgttacttttaaaatatcaactttattgatattttaattcatatatcatgtcatccatgtcactcattaaaatgtatagttcagtggcttctcttatatcagcagttgcgtagccatcaccgctgtcagttttagaacactttcatcacccccaaaagaaaccctacagctattagtggtcactccctgtttctcctttccacagctcctggcaaccactaatctttctgtctctgtagatttacctattctagacattttatrtaaacattattcaagatatggtctttcgtagtggtttctttcacttagcatagtcttttcaaggcttatccatgtttgtagcatgtaaaagtactgcattcttttcttgcaattttttttttgctatttttgcacttatagagcaaagaaatggtcattctctcatcaacaaaaagatgagctgccagtgttttaaaaaataccatgttttaatgatgtaagggtgaaaaaaaaaaaaggaaccagagtaactatatgttagaacttaatacaggtattttaaatctagaataaatatttacaagatggataagttctatgttcattcatgatagtttcattcaaaggatgtttcctgtttcaggtcttcataccatcaaaacctgaaacgtggaattaaaatttgagtttgctgtgtttccatttttattgaaaattttaatggagcgtttcagtctccctttattcttctccaaagcataaaatgacttgaaaatatacaggaaaattaagaaggttgtttagacccagatggtaaatagtgagcactatttatcgtaatataatgagagtcaaattgaatgctaaaaggatacagtttttaattataatagaatatgttgaagtcgcataagaacagtgttatttccaagatttcgaaataggttgcccacatatattgttacttaaactaaattctgctaagaagaagagtacattcttctgaattacagtaatatgcttctacttcagatcattttggaaaaacctgtcttagcctgtggtttcaaacattggactggacttgaaatcccctattactatgtgagattctatttcctgcccataaggctctataggatagtggcttcagtcccactgtctgcttgcctttctctttgatttctgctccaggaagatacttacctcggttctgagcctgactaatcttatggattttttcttttaatattttctcatgtgtttggagctatagggatgtgattaaagataaggttctggagccatatattgatgacagaatgttataagcaaaaatataaaaaatgatttcaaattcttcttgtatttatacctttaaggaatatcttcttttgattaaatatataagcattatatgtattggatgtatcagtagagatattgtttatagattttcatgtcatttttctataggtaatagtcataattgatgttatgagctttttaattaaaaaagaaaaggaaactctttaatttgattgtgataactatggtatgccttgatacagagactagagaaatattatgaaaactttattatttaggccgggtgcaatggctcacgcctgtagtcccagcactttgggaggccgaggcgggcggatcatgaggtcaggagatcgagaccatcctggctaatgaaaccccgtctctactaaaaatacaaaaaattagctgggtgtggtagcaggtgcctgtaatcccagctactcaggaggctgaagcaggggaattgctggaacccaggaggctgaggttgtagtgaaccgagatcgtgccactgcactccagcctgggctaagagtgagactccatctcggaaaaaaaaaaaaaagaaaactttattgttcaagataatttgatcaagtgagagagaacttccatctaagacagtctagcagatttttttggttattttttcccatttaattttgcagagtgtgttgatttgcttttttataataagcattatttagaagtttgcttttcgactcttatttttaagtaggccaaactatcatacgtaaataaactaattaatacaaacagtaacagtggttcaagggaataatcaatagctgctggatttagaccttgtaaagtctaaagttggatttctgtatccttttccttagtagatatcactctaggtagcacttgaagttcctgttaggatttccccccctccctgccccattttctcaagatgtcctgtttttaaagagaaaaattaagaggattattaaaaactttgaatcactatttagatttatatcaacaagattaagttttgtctgtttttgagtttcatgtaaatgtaatcataccatgcaactcttcctctgtatggattcttttgctgatcattgcgtctgtgagattcatttatgtcattgcattctcatttcttattgctgaacattcttctattgtctgtctacatatgccatacttttttttttattctgctgttagtggacatttgagtcgtttctggcttaggacttcaatgagtaaagctgctatgaacattcttataaatatatggcattgtcatgaagaaaaatatcctagtgagtatagaaactaatctttttcttattctgtgctaatcaagagtacagaatttcctggcagttgagaggttatctttaaatgagtaaatttaattagcctgaaaaaatattgactactacgtgaagaaagctctttcagccaagatggtttgctctgttcttactgttttgttttacctagttttaaaaagagcgaattgaatacctaaaataagaattattacttaacagaaagcaatagcaagatgatagtaactttattttgttagttaaataaccatttactacaatgcccgcaagcctagaagaagaaacccgccagagatgtaatagctttttaacacttgcttattatcaaagtaactgtgatgataaagaatgtgtaggttgtagcagaaaaccatattttaggttctattacaggcttgtagtaaattgaaaacatttttttcttcatggaatttctaaaatgtttttgcaatcatttgaagctttattgcaagtgaggcaataaaaagggaagaaatccaattactttatgtgcaragctttcatttcctagttaatgaaagaaaggcttttgttcactaagcatgcatgctttacagttcttcttagtaaattagaaatttcctgaaatagaaaattaggaaaatacttcctgaatatatacactttgatagagggtagttttactaagttaaagcttatacttaagaatgttgcagcccaggtgaaagggtcaacaattagattagatgggtcattgaaggtaataaaaatagcaagcacatactttgtgcttaatgtttgtgaggcattgttctaagctctttaaatatattatttcgtagtcctcacaatagttatatcaggttgataccattattattctcctttatgatgagaacctgagagacagaagtttggcaatttattcatggtcacacagctattgagtagtggctgtgctgagaattgaatatgatcagtctgccttcagaatatgtatccttaaccaatatgctatatggcttttcagtctatttctataacatccaaaaataggaatgggaaggaaagaagcaagaaaaggtaagggcaaaggacctcaactctgtatctttgattttctgcagtttgaacatgatgtacttgggtataattttttggccttttatcttagttgktgttctctgagcttcctggatgtgtggttttgtatccaacattaattttggggaaattctgtcatactgtttcagatatttcttacgttcagttccttcttctccatctggtatttccattacatgtatgttacacttttttagttgtcccacagttcttggatattcttttccatttcttcagtgttttttttttcctttgcttttctgttttggaagtttgtattgatrtatcctcaagcacagagattcttccctcagctgtgtccagtctcctaatgagcccaccaaaagcgttcttcaattctgatctctttatttcttttttaatctttcttagaattttcatctctctttatattacctatctattcttgcatattgtctactttttccattagagcccttagcatactaatgatagctgctttaaattcatggtctgataattccaacatatctgccataattgagtatggctatgatgcttgatctttctcttcaaactgtgttttttaccttttagtatgtttgtaatgttttaatgaaagctagacatgatgtagtgggtgaaaggaactcagataaataggactttattaatatttcgggggaggggaagtgttctataatcctgtgattaggtctcagtcctttaatgagcctgtgcccctatgttatatacttcacaagtgcctctatcctgcaccccttaggtgagacaggatggctggaggggagtagaattgggtattttccttcctctaggtaggttaagctctaataaaactcctagcaggtcaggctctggtaaaatagtttctcttcagggcaggccttgttaaaaagaacagaatgttccatcatatttcaaaatacagttgtctgttggtattcatggggcattggttctaggaccccctgcagataccrtaatccacaaatgctcaagtcccttatataaagtgtcatatttgtgtctaacctatgtacatcctcccatatactttaaataatatatagattacttataatacataatacaatgtaaatgttatgcagattgttaggctgttttttaatttgtattttttgttgtattattttttatttttatttattttggatatttataatctgtggttggttgaattcatgcatgtggaacccacagatagagagccaaccgtagttatttttcagttccccctgccagagcccaagggtttttttttttttttaaatcttcattgtaggaacctgcttgagatcctggaggtaaaactcagaagggtgagggccaccctatgacctggatcccctgaagttttaatctctcagacttgtctatatttgagcctccagcagttcatcaattacagttcaggttttcctaccttgggactgggtttctatccccataagttgattctgtctatctgcctgcctgtctctcttgttttcagggctacagtttgccttatgacttcacttctttgataggcttaaaaagagttgtttattttccagttcgttcagctttttactcgttaaaacaggatggtgacttgcaagctccctgcttgctggaccagaagtggaaagtctcataatatgaatcttaattattatttcagcagtcataaggtcagtatgatagctattattattattattttaccgatcaaaagcttaggctcacagggctagctacataatttgygggcccagtgcaaaatgaaaattagagacctcttgtttagaaaacaggaataaaaagtaccgttaaaggtactaaaatataaagcttttttttcttccacagtctctgtacttatgaaggtatgtttttgttacttaatgttgttttaaatcaagaaaaattaaaattttacattcttaatatgaattttattatttatattatgcagtgaagttttaattgcaaacataagagcatttaacccacatatggaatcaatgaaatgatacacttcatattcttagcttccacatgcatatgtcacttgttcttagcagagcagtggaaacatgcagaaactaactctactgtttttatttcacttcttgatacacatattttctatcaactctaccttcagtttaccgatgaggaaaggaaaaagaactgtcggctgcccttttttctttctctgtcatcatttttactgtatgtgttggctaacacagggaagtgacatgagtaagataggataggatattttggtcttccttgtttcttagaacaccattgccttctttctgcttttgaagcaagttctaataggaacagaaatcatggtctcttgcrgctgtcagtaaccctgctcaccctgtcatagagctaatatacttatcttgtattcacttgcagtcttgtactgtgactctgtgctcatggagcatcatgagccctgtatgcagatgtacagcaaggaacagtggggacacacattgcgcatatatcctgtgcttaagcttatgtcccatcggatttacaaaatagatattcaaagagaaaattattacaaatttcaagatggccataggaaaatattaaaggtagcattggggctctgtgagactgcataggttgcaaacctatgaagccagccatgttcagagatactaagtgacttgttcacagtcacccagctgggaagtgtccatgctggggttaaaaactcaggtgtttggctaatttttttctttcatagttttgctaataagtggtattatcaaaaactacttttttttttccttctctgcaaacctccagaatactgtgtaaaaacaagaataacaatagtgagatgagtgttaaagatatagctgtaggtatagccactcctgttgggtttactgcttttaaaaaaaatcttgctaattcactactgagaggtgactgggcatttgtgtgcaatccatagagtcttacgaacaggagcttaccattgtcaagagaggaacctattaatgacaagtttagcagtactgtagccaattcctgtctaaagttaaaggctctaagtataattatgatgggtatttcaaattggatacttgtaagagtgaaagcaggcactattaaacagttaagttggaataacaggcatcagctggagttattttgagcaaaccaggacttgtgttcacctgcctctcattcacacacatgctaagccgaataagcatgccactcctgtgtgccccagaaaacttctattttctaactccatcattacactggtccacactgaaccagattatgtttgtgtccatgtgcataactagagtatgagtttaagattaggaaacgtgttcttcatttttgtatccctagtgcttactagtcctggtatgtaacgataaaatgtactactgcaaccactagcagctaccatttatgaagcacttatgtgccagctactgtgaaagggactctctttaaattactttgcttacttctcacaaaaatcctgcaaagtattattttaaggaaacttaccagtgtagccattcagtatttgggatgaataataagaaactttttagaaccatttataaagcactctaggtcattctttgagaaatgctacaaactagggaaccaggagattagagatgggctcacgtcttgattttcagaaggaaaatgtagtggattatgaatgctgtatcattaagcttgacatggattctatgcaaaattcaaaaggattttttttttttttaacaacttacttcttttccatagtcttaccagcactcactggttgcctgccatggattctttaagaacagttcctggctggcatggtgtctcacacctgtaatcctagcactttgggaggccgaggcaggtggattgcttgagcttaggagttcaaaaccagtctgggcaacatggtgaaattccatctctacaaaaaattagctgggcgtggtggcttgtacctgtagtcccagctacctgggaggctgaggtgggaggatcacctgagcctgggaggtcaaggcttcagtgcgtggtgattgcaccactgcactccagcctggatgacagagtgaggctctgtctcaaaccccaacaaaacaaaacaaaaattagttgggcattgtggtgcacgcctacagtcccagctccttgggaggctgaggtaggagggtcgcctgagcccaggagatcgaggctgcagtatagtgaactgtgatcttgccactgcactcctgcctgggcaacagagtgaaaccgtgtctcaaaaaaaaaaaaaaaaaaaaaaaaaagaaaaagaaaagaaaaaaaaaaccccacagttcctgtcagactaagcttgcttattggccaagattcttaaatatgcgtctggtcaagatgtagacaggtgggcctgatgatcagatagtaaggtagattatgaaccggatagacagctatccaattaatagaattgatgtcagtttagaggaagttctctgctttcttcaggggtcaatactgaacttcattcttttcagcatttttattaactgtggatatctgtgccatattgttcaaattttcaaatgaccaagcaataaagattagttaagatatcaaatgacagaataaatccctcagatagtgttaaaataaatgccaacaaattggataaatgtaaaattctgaagcaaatgtacccaaacttaactgtcctgaatatagcacaaaagaaaatgtcattgaattttagatgaccaaaggtctggtatgaattaatggtcttctgttgctttggagaaggtcagctccacaaatttattcctccatttgttttatgcatggctgtagcatagagagtatggctaaatgggtagatgttacaaattgtctgaagaggatactttctaatatttgtaattatccaaatgtaaaatatgctatatcatcatatgcagtgattccataacactggaagattttcttacagagagaatggacgtgtaagagagatgttacagtagtgttttgtgtatcacataattcactaaatgtcttcaaggctgctccgacttctgcaatttgtgtaaatccttgataacttctccagcccagtgagatactgtttggggcggtagtgtccataggtcttacagagaacatttactgaaagatgtccatatgattggggaaataaaatgtagattgtaataaatcctaaaaatacaatttaagaaagaatattaaattcaaaaagagtactctatgtgttgacagctttaatttgtaaaagatctatattataaagaatggtaaacaggagaaaaagaaactaaagattttgaataaataagatattgggaataaacaagaattatatgcaaaattttttctcacataaaatagttttaaggttgtatataattcagttttgaaagcatacaaatacaaacagatatagtaattatagctatcaatctatataggaatataagactggtttttattaatgtatttatagcatatagtcaaaagactttatttgagtaaacaactaatgtaggtaatatagtggataatattaactcatgaattttttactgaaaattttagtaaaggttaaacctatgaagatttcagtaggtaatcagataggatagtattctgggaattaaaggttaaacctatgaagatttcagtaggtaatcaagataggttagtattctgggaattatgtgttgttgagtaacttgttagaaaatgtatctcagataatcaggttctactgaggccgtagattagttttttcctaaagtattgctctgaccacatcacagtcacaaagcctcccacctacaacaatggtggtcagatttttcttcctcactgcagttcatatgcacaacatacttctccaggagtaatattttttcttttcactacccccattgaaaaacagtgacatatatgaatgctagctctagttggctatttatttaggtccttccacattgtggaaatagaataaaaatcttcagattcatcttttattccttacatgtagaactagaggtcagtcagatacaagcaccatctagcacctttcccactcagtgttcttcacatggtgccattgccaattccagggaggtcaatgcttcagtgagtggtgattgctccactgtactccagcctgggcaagagtgaggctctgtytcaaaccccaacagaacaaaacaaaaattagctgggcatggcggtgcatgcctatagttccagctacttgggaggctgaggtagaaggatcacctgagcccaggagatcaaggctgccgtgagctgcgatcttgccactgcactctagcctgggcagtagagtgcaccgtgtttcctatttgactctttcctatttttcctacatacacaaaagttaatgtcactacctttataaaatcctaatcacccacgactaccattacctttgaacttcaaagagtcatacttttcatgtggtctttatagtgtaccttgagttaaaattattggcatgcttgctctgaccctctatcagattgtgtttattttttttttctgtttttttctttgtcttctttttgtttttgtttttgttttttttatttttgagatgtgtttttgctatgttgtccagcctgttctccaactactgggctgaagcgattctcctacctcagcctcacacatagccggaactactgtcacgtgccacctggcatgatttttttaaattgcagttttctgttatgtcattgtaagaatatgcatgtattgttaagcattgggtaaatatttatttttaaatctaatttttgatagatagaaattattcagcaaaaggcaccatggtgcagggcaaggaaccctgttaggagattaacctttgccacgatagccacttacggagcctttggacaaatcatgtcatttaatttccttaatgttaaaatgaaaaagttgaatgtaatacattttatgtttcttgttgttctaagattctaggaatattaaaggaaactgattataaataaactaagttataatttgagatgtcagttttaaaagaaaattttgaataattaccactagaacttagaaaattgtatagctttcctattgactatatatttatgctcttgtctacattaactggccagctgaagaatagtgaatcaccttctagaggctcagctgttatgtctgttatttaaagggctaggaaatggtggtaaatgtaggagttgggacctaaatagttttttattcaattatattctgtggggtagcgttaatgaatcacaaaaagattgggtagtaaagcttctgctaataaaagctttaataatttgaacgagacatctgctcaatgtgattctaaggaaattacattttataaaattgctttatctaagtagacttatgttcttgcttgttagaaaattttgtttaataaattatagattgcctaattttatctacccacagttgactgcattcttcacttattaaaagacaaatttcctatgcaatgttttcaatagcagcagaatttaaagtggagtgagtctgtatctgttgcttgccatgtctgagatgaatgtgaggtatcaaaaggatgacagttaaatgagggaaggtgtggtcatcaaggtattaatttactgttatcacacactagtatccctgcccataaatcctaacaagataatagcatttttattcttaaatcttctaaaatttggcttccagatattatttactttgtatttatgtgatagctatattttaagtatcttaaataattgtatcttgtaagtctttgcaaagtacaatacagttggtatgctacagagcaaaagtacaaattgatagtttatgtattcatgtttgttgtttaaggtttacaacctttatgtcttgaaaatattgataaaaatgacttcttatgttataggcaaacctggaaaaagtcaaacatgttcttgaagacttttccattttagaaagttttcaggaagacataatccattacacatatgtctgtgtctgttaaccaaaatatttaattggaatacattttggaaatctgttgttcctctctacacattaacattggtgatttatattgtaaagaaagacaaagagaatcaaatgtgctttgctgtagaaactaagtagactttagagtggccatgagacaggatttttagcatgtacacagggtactgctgctctcttcttgattaatctggattatttaaattgccttgttgctacagatactgtaatgagggacaagaagaaaattattctgaacttcctatcttatttcatgagatttgattttaattattttaaatgtttggtttttgaaatgctggattcttcaatgtgacaaaagagaattatcatttcaactgtctcttcctagtccaatagctgaggccagccatgattttccccttcagtcagagactgagtacctgtcttgtcagcttttagaatatggcaatattaggcatcctagcagtggtcatgatataatgattggaagtagtcttttcttatttttactttttttttaacttttattctaggtttaggggtacatgtgcaggttttagttatgtaggtaaattgcatgtcacaggggtttggtgtacagattattttgtcatccaagtcataagcataatacctgatagttttttgatcctctccctccttccaccctccaacctgaagtaggtcccagtgtctgttgttcccttctttgtgttcatgtattctcagtgtttagctcccacctataagtgagagcgtgcagtatttaattttctgtttttgcattagtttgcttaggataatggcctccagctccatcagtgttgctgcagaggacatgatctccttcttttttatggctgtatagtattccttgtgtatatgtaccacattttctttatccagactactgttgatgggcatttaggttgattccatgtctttgctattgtgaacagtgctgcgatgaacatacgtgtggatatgtatttatggtagaacaatttttattctcttgggcatatacccaatgataggattgttgggtcaaatggtaattccatttaagttatttgagaaattgccaaactgctttccacaatgactggactaatttacattcctaccagcagtgtatatgtgttcccttttctccacagcgttgccagcatctgttattttttaaatttttttaatgataggcactctgactgatgtgaggtggtgtctcattgtggttttgatttgcatttctctaataattagtgatgttgagcatttttttatacacttgttggctacgtgtatgttttcttttgaaaagcgcttatgtccttgcccattttttaacggggttgttttttggttgttatttcgtttaagttccttatagattctgaagattagacctttgtcagacgcatacttagcaaaaattttctcccattctgtaggttttctgtttactgttggtagtttctttggctgtgcagacgctctttagcttaatgaggtcccatttgtcaatttttgtttttcttgcaattgcttttggtgtggaagtagtcttttgataggctttgcccaccttgatttactggtgatagtattgggtttaaatgtacaatgtaatggaataaaacacaacacctagctatttaaaaatttttttaaaaaacattgaatctatgtgtgtgtgtatctttattaggggattgcatgttttcaggttttttggaaccttcataatggcagtatctatgcaaagattttctttattccatctcagtttgttttgtgctgctgtaacagaatagcacagactcatttataaacaaaagaagtttatttgctcatggttctggaagctgagatgtccaagaggacagctccagcatctggtgaggtccctcatgctgtatcatcccatggttggaagctggaagggcaagagagcacttgaacaagagggggccgaaattgtttttataacaaattcactctcttgataactaacctatgcctgtggtaatgatattaatctgttcatgagagtagagccctcctgacctcatcatctcttactagactccacctttcaacactgttacactgggattacatttccaacatgtgaattttgggtgacacattccaacaatagcatctcctgagtctgtattttaagttattattactcatctaggactaggaacataagtacttacttcctgtcgttttacacaaaaatctgtaaaaatatttttaaatataaataagaaataactttcagtttttgttgaagtctttcaagaaaactgtatagaaaattaataactcttaatggatattaagctctaaaagattaagtatttgttactctatctagaattttagaaggattccttacctatgtagtttgtgctttggtgtatctgtccttaaatgttttaaaaataaaaatagtgaggttaatttcttatgtttacaattatcagtgaagaagagtatcatctgaatttaatctttgtagctttcactaatatatatgaagaagtatatactgtatatactatgaagacatagaaaagtaatctctaaaatcacctttgccacacgttgtgttcaggttacggcctccacaagatttgataatggagggatacaaagtaaattttaaagtgatcaatccttttgcttttttgatttgtgggacaacctttcagatgccaactctaaggataattcatgtctgaattgttgaaatccatctagaatagccaactctatttggaataatagggtttagggcatagacatttctcattcataatctgaccattgtaggagcaaaggagcagactgtctttagagcagcatttgtcaacctaccactctgctaagaaatacattttacattatgatccagatttgtgctcacatgtgtgtgcaaatgtgcaaaacaacaatctgggaatatttacctttcttttatgcagtcagtgtactctattttctattctgtatcatttttatatgccaaaaaaagtttcgttgtggcccataaaatagatttcaaaaactgctagtgggccccacctgcaatttgataaactgtttaggatttctcttattctcgccttagtgtttctctttattttgcacagctatatatatgttctcatttatacagtttcctatgaaaatggttgatgactacccatttaaattgaaatgtaaggaagatgagaagcttttagaacacagatacatgtgtgaacatctggaaggaaagatattttccaaattgtttgcagtagttctgagggtgggagttgggattactagaggacctctgcattgctcaatttagctttttctttccttttcaaactatgacagatagtttcatactcagcagcattttaaaaggtagttctaatttggtgacaaatgccttataaacaagagtttctatttgaatttttaaaaaagatcctttttagcctgaagaggttccaaagtcttagatcatagaaaataaataggaaggaattcctcacaagtttagtttgttttatgcttttttccatggaagaagattcagtaaaatacaccaaaaaaaaaaaaaaagaatgctaaatttggagtggcagaaaataagaattttagttcctgtattcctatttggcacataacatctgagcctcagttaatttgcggaatgaawgtgtttggccagattttctaagtttattttcaacttcaaagttttctgatttttaagccaaattaaaatagggattagacttaactacctacttaaagactactttaagacactcttcaragtattataggctgtgatgagaccaatgaagacccaccccaggaagctgctaggatcctgccctgcaatatttgaagtttgcatgctcgtggccacacgattctcarattcccttgcagatttgattatttatagtagcagattgagtaatcagttgaaaagaattcctttcttcatgactacagggaatatttttcttgaaattattttgaaatccttttgctaagcaagataagtctgaacctgtattagaggttgaaaagtgaaagaatagagaatgtgaaatggattatgttaaacttctgaaaattatatactgttacaggtggctaattctttatttgagagagttattaaagaattgggccgggcgcagtggctcacgcctgtaatcccagcactttgggaggccgaggctagcggatcatgaggtcaggagatggagaccatcctagctaacacggtgaaaccctgtttctactaaaaaaaaaaaaaaaaattagccgggtgtggtggtgggcacctgtagtcccagctacttgggaggctgaggcaggagaatggcttgaacccgagaggcggagcttgcagtgagccaagattgcgccactgcactccagcctgggctacagagcgagactccgtctcaaaaaaaaaaaaaaaaaaaaaagaattgacacctggtaatagtaggctaattggttaarcaataattctaagggagagtgtagtgattaaaaaacaaataagggtagatatgtgttcttagaagttaacgtatctctaatagctaacaaaaaatgaactcatgtaacaactaagttgtgaattcttcaggtagttgtagaagaaatgatcttgaaatggtttgagaaatgaatgaatgttttctttatttatttatttcattttgtttttaagagatggggtcttactctgttgcccaggctggaactgcggtagtgcaatcatagctcactgcagccttgacctcctgggctcaaccaatcctccagcctcagcctcccgagtagctgagactacaggtgtgcaccaccacacccagctaattttttcattttttgtagagacagactcttgctatgttgcgcaggctggtctcaaactcctgggcttaagggatcctcctaccttgtcctcctaaagtgctggtattacaggtgtgagtcactgcactcaactgaacgttttattttcttagtttattagaagtaggctttagaattgataatccagtaggtgtaggttttttcattctgtcctacgcaatgttttttgtgagaaagtaagtttggaatgtgtaactatgacttcggctcctgagaactagaagaatattatatttaaaaagtaattaataatgtagattcaggaagaaagtatatcaaataccatttcattaggcttttcctggcagttgtgtctcatgtatcatacagtgtgtggatgatgggctaacagtgtgctcacgaagactccaaggcctccccagtctcagctaacaggatgtattagtccgttttcatgccgcggataaagacatacccgagactgggcaatttacagaagaaagaggtttaattggactctcagttccatgtggctggggaggcctcacaatcatgatggaaggcaaggaagagcaagtcacatcttatgtgaatggcagcaggcaaagacagcctgtgtagggaaactaccccttataataccgtcaaatcaacagcacaggaaagacccgcccccgtgatttaattacctcccactgggtccctcccacaacacatgggaattatgggagctataagatgagatttgggtggagacacagaacgaaactgtatcacaggagtacattagtagtagctaggaaataatatgaaatgcatttcttcaaaatatataatttcatataaaagatgggaattacgggatctacaagatgaaatttgagtggggacacacagccaaactctatcacagaagtacattaatagtagctaggaactaatatgaaatgcatttctttaaaatgtgtaatttcatataaaagagctagtagttaaggacaattatattaagagttaaattgttttattcactattttggggtcccaatatgtgaggattgtcattgcaacttcaacagtcatgttcgcttgttttgtatatgacaaataatattctaggttttattatactatgtttcatattttttttacactaactttatcagaaccctgtaattaattggggcttaaaatcttgttaaatttacttaagaaaaattaataaatccaattatttactttaaagctgcagaagaaagatcagcaactggagcctaaaaaaagtaccagccctaaaaaagctgyggagcccactgtggatcttttaggacttggtaagtaataaaaaataaaagtcactgctggagttacaaaacaattgaaacctttacttggagtgaatataatggctttatcttgagtatgccaaaacgtacctgttaactgaatttgaaaatggtatgattagtttgctaacttcccacaaaaaagaaatctttaataagggagccagtgtctgtcagcactgttttcactgaaatacaagtaatgagttctttggggaaaagaagatatcaaagtaatcttcaaaggcttgctggatgtgacattttagcgcttacaataaagagtggattattttctcttctctctctctctttctcgaatttttagttttgtgggggatttttcctcttagcaaaataattctagggtagccttattgtaaaatacgttggtttaaaataaaatttaattttggttaactgaagcaacacattttgcatccagatctagtgactagattcatataacttattcaatgagaataagaagtgctaattttaatataatgtcctgtttgttctcatggctgaaaggtatatattgtctatgtggtaagtaaacaggccttcattcaaggagtgtttatagtgtgcttatctacaaatattgttagcttctctctctcttttttttttttttttacatttttttcttctaaaagaattggcttgatgaaaggttacttttagtaatacctgagccttggcacaggaataatttaaatttttctttttttttagtttggagaaagattgagaaggaaaagagtgaaaggcagttagttgaagtggaagagttgaccttcatgtactgctttccaaaaaattgatcctagttgttattgaataaattgttgtctgttttaagaattatagctgaatgttttattcatttcttaggaagctggtacatcgtacaaatatactccctggaggtacaattcttctatgatggtaaaaagttgtgtattagaaatataaaaaataactgtaattttgaaaataaggcttcagtccaggggctctaaatataattatgttgaattgtagtcctcataatttcttgttttatttcctttactgtaaatgagagaaaaagaaaagaaattattattaaagtaaaaaaaaatcttagtaaaactttagtatatcattatcttcactgcagcatttcttttccagtctacatgcctggtttattagttcataacttagaaatataaaatataatctaggcctgattcatatcttacactcattcattcaccaaatagctactgtctattgtgtgtcaaggtaccattgtagatactagggagatagatctgaaagaggacagactgcaacccctgccttctggggctttcattccatctggagagacagtgaataaacaattaaataaaatatattgtaggttatatgtggtaaatactatagatgaaagaaaacaaaaatggatggttgtaattttaaatagggtggacggggggcattcacagatgtcttattggagcaaagaggtgaagaaggtctgggtatctggatctgtaagcaagagtattctgagaagaacacagcagatgcaaaggctcttcagtaggagcctacttgaagtgtgcaaggaccagcaaggatgacagtgtggctaaagtggaatgatctaggggagagtagtaacagaggagacaaggaaggagggggtagggagggggcaagctgagtataacaggactttggctttaactctgagtgacctggaaagacactggaggaatttgctgaaaagaaataatctgacttttgtatttgaagaattattgtggcggttgtgctgagactagattatagtagggcaaggtggacaggaaagggtttttttaaggatgacattacaagatgtttagtgttagaaatgagcttgtagagaggtaaatctgatactttcaggacaaggaaaaattgctctagcagtgtccttgaatagcccggagtggatgggatctagttgacaaacggtatgagtggcctttcagatactccattattgttggaataatactgcatagtaaataagcctcaggtttcaacagcttacaacattaaacatctgtttctctttctgtgggtcagctagggcagctctactgtaacttcatttgatacattttctaccttcctgattattgcagggcactttttaccagccatttcactattgcaatatgtgtctccattttaagttccaacagtgtttccttatcttctaccaccttgtctcaaagtcattgcacagattttagggtttggttgtggcagcacccytcttgtatcagtttctaaagtagtcagctcttgctgtgtgtgttacatagcaaacaactccaaaatttcagtggcttacatcaactaacatttatttctgtcactcatgggcctgtaggtctgctgggatgtcactcttttggacagtggaacattttcaggacagtgtctttaagggagaaccaaagttcatttagcaggagaagttagggaatgtttgtgaaaaaaggttaagaatataagggggattttgcaatgactcacagtgggtcattagatcatttggcagaagagttccaaagataggaggagtgggagatggggttagaaagagggctgtcttgctgtgagggagttgtagcagcagggaagaggaagtgtcttacccagagcacatacagctcttcacatctgctggttatcaatttcctaaactcttaaaaaatattttcagactttttttttaaaaaagctatgtttcagcataaaatcgatgaattcatgaaagtccaggagactacagagaatcaaaggtctctttcagctcaaaacaaacagtggttctaaatctggattgatgattggtgtccaccttgggcctcaggctatttatctgctcagaagcatgccgctctcctccaatgggaccctggttttcccctgtaaattgaaacacagcggggattgggggcgtaggtgccttgaagtatgatttatggtcatgcaaagatgacagcatatctccgtatgagtgagactagaacagacattaacttaaaacatttccagaaaatatagagagaacttgtatagcgatagttcagttaacacagctatggatccttgggactcacggccttctttatcactcttaacagtttcataatagcctaatacttaagactagtttttgatctttcctttatatgggactttaatgaacttactttcttttgtgtaacccagtaactcaggtaaaacctttcttaagctcacctttcctgatctactacccattcaaagttcaaacataaaatgctttatattatatatactttatagcagaggttgtccatttttttccaagaagggccaaatagacattatttttggctttgcaggccttatgatctcttacaactattcaactcccattgtagtgtgcaagtagccataaacaaacatgtaaatgaatgagcatgcttgtgttccgatcatgcttgtgttcckatcaactgtaaaaacaggcatgggctagggtttgctcacccctgctttatgttcccaatagtacctacaagagctgcctcatatttagatattaatttgtgtttgaaagctataggactactatttattatagtactttactctctaataccataaacagggtgagatacttgacttgcctcgtcttagaaattaccaagggcctggggcccctcttgactaagtgccagattgaataatctctgaatgtaccagatttgaatcaaacacagacatatcctgacttgagtatgcacgtcctatgttaaaatagaattaaaatcagcttctagggtttgtgagaagagtgctcttcgggtccccttacttaggaagctagtttaggactgtgaattatactgttagggtagtgtctattctttgttgtttattagttttaaagatgataaaaattgacagactgcttaccaattggttaggacagttccccccgactaatgcttctattcaatggggctcatttttagagtgtgggggcataagaccgcctctgagaataaagtcttcaagggcgagcacatgctttgggcataaggcttgagaagaattacacattagtggccttgaatgtgaccttagaggtttcatttcaacctcccattaatggttcctgcaggggttctgttttgtggccatctgtgtaccacatgcgcactgcagagcagcctggttccttgtcaggaggcgttacccacagtcctaccagacacagagttgtatgtgtcgggtgcactgccgaggctgtctggggggaccgcatcctctcagtgccccagaaagcatctcacaaagaatcgagtcatgatcttggtaatgaaaatctagctcaggggtgtactcatgtgtttctctattcactgcttatataaaactgatttgattttatccattctattcgttactttaatctggggaaatttctatctaaacattcataacttttactttaaattattttaaatactgaactatatggagaagtaggtagagattccctcagttttttcttaattgaaacactcaaaggaacatacagttttgggcaagtcgatgagaaaagtttgcaaattttagttcccccattcatgtttgtgttcaggaaataaaggctttaacatatgacagtggtcaagacaatgctagtgaaattaagccattagtatataacccattttattattagcaacatatacccagttttatatgagagaggtgaatacagaaagtactctacttacctttcaaacagaagattcctacagagaaatttctagccatttctcaaagtccatgtgctatataaagcaaatttgggaatgagctgagtaaaagaatgccagatttagcagcagtggtcctggtgatccacagttaccagtggacctggaaaaccgctggtgtcctagagctacctatttgatcagatctggaggacgtttgtgtagttatgtgcacattccccttctcttggaggaggattgaaggtgaggaagactgtagcagaagtgcccaagaaaattttatagtcaagttatgtttttcagagatggtttaaaacctgataacaacttgtattgcctctgctcagaaaagtatgttcagtgaactattattatgaactattattaccctttcaaaaaggaggtctcagggattggtttattcttatgtagtcacactgcayaggaaagaaaatgcagttacatgaatatattggtgtaaggtaactagcaatgggcggatacttgcaagtggtcctgagtcagtagtagggcagttggtgaactgacaccagaaacgggtgcygctgggtgagttgatgatatcacagactttagaagagagcaagaagggacagcttcttagaaacagcacagaacctccagagaatgtgctggtggataggacaaagaattgttaggtgttgagaggagtaaaattgacctctgaatgaggcgacttcaaactacgagtaacaggaagcctgaaaatggcttaaacataaggacatctaattatctcatttgaagagaaatcgggagacacggtggtttggggccgtgcagtggtggaacagtgagcgcagggagccagcttcctctttgcttctcctcattctgccgccctcatcacagcactggctttactctggaggcttgtcaccttatggccaacacatggaaggtgcagcatcctatcctcaggaccacgcctaaaggatggcttttccttaccagtttcttttctcaggagtaaaaacttgccagaaaattccccagcaggattcccagggtacgcttggtcagaattggattatattacctcactagttgcaagagaggctaggaaaatagtattcatcctatagaatggaggtaggctgtgccagcaagaagcgcccagatggggctttggcagtctgtggtatctggcacagttgcatttcatcctgacagcagctctttagggtagagagtattttacacacccacacacactcccccccccctttttaaaattaactaataataaaactaacaactaataagctaacaaaaattaatttccaaggcactgctgctgtactgtatagaattgggactcaaacctagatgtgtttaatgccaaagtctaatttcagctcttaagatgaaccaaagcaaggcatctaacccaagtattaaattatcttattattttaataatcagatactgctaactagatgccaggggctgtcttgtgtgctgacagatatttatttattgaatttttgcaacagccctgagattggtgaactatcattatttcgcttttatagaagagaaaactgaggcacagagaggttaagtgagttgcacaaggtcacacagctggtagattacaaaactgggatttagactgagtagtctgacttcggggctcagattcttaacactatgttgagctgtgatagaaaataaaactctaacaggtgagattgtgctatacacgaaatagacattggacccattcatcaaatcaatagatggcagtattaagtcatgggggtgggacacttggtttagaggtagtacctgggttttgtctgccctctagcagcttcgtctgggaaatggaaataggaactcttctgtagctgagggccagaataaatggtgtgctttatgtgaagcacctagcacagtaacttgcacacagtcctgtgctgagactataacctgaacaccaggtcatgggagatcaccaagaggtagtacaggcctttgaaggaatgtgtggagaagggactcaaaaattatgctgagtaacacacagtaggactcctgctgggttattcctttaatagccactaccattagagagaaagagggagatagagggaaacagtgattgcaaagcatggtctgtggcctctgatggatttgcagttgactaaaagaactgaggaaattgggtggcctcaggaatctagtttatcaccattttaaacatttagaaagaaatttggttatacaatctggtttcatatttatatatttcttattttttgaggccataaaatggtgcagtgatttgatatatatttattttttaaacaatcagttctacaaagcttcctccttataccacttctcagctatttcagatagctctaaatcagagtgcgtgtgtgtgtgtacacatgtgtgcatgtgtgtgtggtgtcttctgaaagacagtagcaccatggggctcttccccttacagagcatcatagtgcctgtgcataagagaatcccctgatcaaaagttggctggtttgtagaaatgtgtagtagatttccctgctggcacagtagactggcatttggtagtggcttgaaaagggagggccaaatacagtaagaggattaggattatcttttaagaccatgttagtcattttagcaaattagcctaaatactatttaactgtataaaaaattaactgaaaaataaaaataaatagctccagttagctctcaggcacacttaaacaaattgaaaacaacttaaagcttgaaaagtttaatatgcttcaaatggacatttgtgacttgaatttactaaaataagacatgtgagttgatgttacaaatcaagtcttgtgttttaatataaaggaattccaagtaataataaaaattaaggagaaaactttaaatggcttmttgagtagaaaataaaaagggttctttgatcaacgtgaaaatttagaaagctttaaggagttttgccattaaggagagaatcacttcatatcatggacgcagccttctttaaacagtgctgtttccactttaatttcatcactggttatgatgacgcttcactagttatggaagaagaattagatttgggagttttcattgtagcaagggtgtactacaggtagaaggttcatgctcagtcaaaaatggtaatgaaaaacagccatttgccacattcttatctgccttaaactagattagtaatacataaaatctcatgttgctctttgacattttttcttatttgtgcaaatagattatgatcagctaatgcctctgacattcaagtaaaggatgaattcaattaatatttattgagcaccagcagagttcatggaacactggtaaacaccagaagatgcagctctgtgtgtttatagtagtgcaagagggggatggggctgctgtccagaaactggaagacagaattatcattgagggaaaagatgggattatctaagagaactggttgtgaggattcagtttgaaatctggattaatgctaaaattccaatttaaattctattttccttaattcagaggttgattttttcttgctgcagctagaggagaataaaataagtttattttgtactatgcaaacttatttcaagtaaaatctaatgttttacggacatcacctttagagtgaataacagttggaaaagataagcaaatgcccagataaatgcagcttttagagctgtacctttgtagaggatcttatgatttaaaacccatctgtatcttatcatagggcacacaagtgctatgttaggacagttggaacagatgagcaagagggtaagatatggctccgaccagtgaggtagcaggtagaatagtcctgggaggtgccgtgacaacagtgatgcactgaggtttggacagaggggcgctggagacacatttatgattgagagaaagaattccagcctcactgtacttgttcaactggaaaggggaagccctggtgtagggattctagttaagaagcagttgtaatctcataggcagatagttgtgtggaagctgtgtctatgaaaacagaggaagaggagccagtccaggatattggtagcaatggctgtggagtcttcaaggagaatgtggctgtaaactctaagagaggcgattttacaggagaaggatcagctagggctaaatgtgctggtggtaagtaggaagaggactgaaaaggatttgtagccaggagattgcttgtacttttcaaaaatagtgtcattatttcacttttctcccacaaaagtaggatcacctgaactactatttgttttccgccatggctctgctgtcaccaagaaatcctcccataacctgtgtttggaaagcatttcaattaatcatgtattgagtatgtgctttgttccacgcattgaattaaggaggcagctgcactcttcctggtgacgaagcaggtgggactggtcatggctcggggctayaaaagtggtgccagcgaggagtaaagaggcttctggagtactggggcatgcctgttcagcctaagaacattccgatgccataaaaactaaaaatgaaaaggataagatgcttgggaaggcttctactttgcagcccctggattagcggaacatttggaggtggagttggtaggcctgactgacccgctgtgggtggtatggcctgcagtggaggtggtgctgggtgttgtgggctcaggagtcatcctgtgcctcagaaaggagcttgtgccaagtactatgcctgggctgggtagtgaagccagcccctgccctcagggcactattttagggaggtaggtcaatggtcatgtaaatcattgtaactctgggtagggaatgggcacctgtttctgcctgagaacaccaggaaacatttctcaaactggttayagcagttgagttttccgggygcaccattgagacccgtgttgaagtcctaggcttactgtgcagattccctccaggtgaggtaaggattaaactgagatactttattgatcagagtatctggcacatagtacttaaataaatattagtgkttaaacttgtattaaaatatgaagtgttgtattcttatttccttttagttttagtttataaatttaaaggcacttggaatgcaccaaggggaagacaatattgttaaaaatactttatttacctcatactcatttggattattggcgtcagatgaattctggtatagttacagttaatagagtcatttggctcacttcccaaattgaggatttttaggtgacaagagactggccctcatgactttgtcatatttgaaatgttacctctttctaacatctctcagtgtcatgatgtgaagtgggccagtgaatgcatgctgggaatgccttctgttcttggaagttgtagcactgattttaacaatttttttctgcagctgaaaacattttaaccttttcctgtcggtttctcatatgtgggtagttaaaaacattcatctatcaattcagttcccaaataagacactagcctaacatcttaaggtaatgaagaaagaaaatacttaccacaagctacttaactgtaggtttgatgtcttgcctttaagatggaaatcccatcttcattttactgcattgtcctaatttcttctgtttgctcattgccttttcaaggggtcctttgtgcttcattatcattctttatgatgttcccagctgaatttcctccatttgccctaggcttttcttgtactctggatctcccattatttttattgtccaccagctgtttctgcatactaattaaagggggactgctgcctcctgctgctcccaccatcattccgtagctgagcaaggtgcatgtctacggtgaattctgattagttttcacagacatcccctaatctcatagaaggcactgtgtggtctgatgttctctctcccctgaaagaggaagtgtgtgtgtgtgtgtttgtgtgactacatgtgtgtgcatgcaccaacaaggtataacccatgctgatttaaatgtttttctcacattatggtgatttacactatttaatttgaataagctttatgctttctaaatgttaaagttatttatctgaataactgttttcagcatcttggtattttcttgattttgtggcctctgagcttttattaatcagcaaagaccatgttattagtgggcccatgatcaaaaggatgcatttaactcccaataatttgtgaatattcttagttgaccaaggcctgattatatcccacagttgcttccaggagcccagtttgctcactgatgaccatatccacctgaatccctccctaaaaactgaaaagatactggtgtcagtacaggatagtggagtggggacatgatgaggaaaattttgagtgtggcaccaaatgatttttagactgtttaagtaactgcttctcaaacttagtacaaataattataaactattttaaagttgttttttaattttcagaactttaagtgatttgtttataattaggcgcagttgaaattacatggcttttgatgaaatgtggtttaaagagctctagtctagatgtgagaagactctgttctggtacaaattttgctgcttaaaaaggtgaaggacattgaggaagtcttttcattgctctgtgtcctagttggtataactggagataatggaggagatgcccttctcatcttgcatcgggacaaaaatgataacatgtaaacattctttaaaaacatccaggatgaatgtgatgtttataatgatggtaatgataacgagtctttaattgtcttttttaaacactgaaaattaaaaacacaatgaccttcaaaatgaattgaagcaatcccttttaaataatgtgttaagcaagccaaatgttgtaagtaaaattagcaactattgaaaacccactgggaacttgtgtttaccaattttgcaaggctgagaagttttcatttaggttaagaatttgttttttcaacaattctgtgaatgcatagctttgatagtaactagaaaaattgatggctgtgaaatccagaacccaccgttaagggatcaatcacatggggagaagatggagtagagacaaaagaggggcaggtatgttgcagatggtgagagcagagagcaatcacctatgctcatcacaaggatgctctgtagagaaaaatcttggtgaggcctggcagaaagttccttacctcaggtttttgggggggtatgaaaaagtcttccttaatcaattgaaaacagtgtcarccttgccacaaagattgctgtccctaagcaggtgcttcctctgtctcattctaaaaaggattctgaagtccctcagacttactttgtgaattgacttcatgacagctccattaaccatggtggctggttacagagagatcacaactttgttgtttgtgtgaaatgccagaaatttcaagaggctaattttaatatagtaataataataaaaaacacatggaaagagaatatggacttgtttatagtgcagtggtaaaaacagaattcaagttatgttgcagtgaagggacatgagctgtgtagactttatttagaggaatgttctgcttttatggtgaaaatctggaaactacctaaattctcttgagtcacacattgaataaataaattattataggcacatgcagtatcacagaatgcaaatcccctacctacacatacataattttatataaagaagactatttttgtatgatcctatatacattgtttttaaacttgtggtaaaacacacataaaatttaccattttaaatattttacaatgtataatcagtgacattaagtacactcacattgcacaactgtcaccaccatctatggtgggtacttttagtttcttcatttttgcatggtttgaatcttttacaagaatgtgttgcttttacagtaaacattgaataagattacaatctaagactttgctcctgctctgtgacactggacaagttattagtcacatatgtgatactaaagggggttaaaggtaaaataagacttcagaaaccaagtaatatgctgtgtgttgttttacggattagaaaatgtattgctagataccaaatgtggtttagatttgaaagtataagtaaatattctgagaggagtctaaggtactaagtagaacagacttaaaatttcggaaagctgtacagtttataaaagtaataagacatagcattggtttttagtggatgcgctttgtgattctcactaaatgcatcctgggcacactggtgttctgtgaactagactgacatgtgctgtggtaaaaagcaattgatagtattttctcagtttgccaaaaaatcaacgggattttctcatgttaaatttttttttccataaatttgtctgattttgttaactactacttaataaagtaaaaacaactataacggaaaaactggaaatagttgcttatattcagcttgtcaccgttttttttccttttattttggttgcagtttacattgttttagaggacatgtgcttctatttgagtttaaattttataaacatttaaaatttgtacatatataagtatatatacattttatatatataattatatttgcagctaataaagtgcttcctcaattcatgtgatagaatgaaacatgtctaattgatgacgatgtttgcccatctctaactctgtagctcatgagttaaatcaccactggcttatatgtcattattattggacttcctttactgaagtgtagatacaaacaaaaaagatattccttagttgtgtttttaaacctagaatgccttgtccctttaaaatatcactttatttctggctgatatttataatgtactatacatcatgtaaatggggtatggaatgaactggaaaacaaagtagcgctttaaggaggtctaactttaaagtgaatattgccatttgaaagggttagaaatgaaaaaaagtattttcatgtatgagtcttaattctttgatagttgtctcagtttaaaattctatatattgtaaattataatctatgtacattgktttatttcttcaccttttaattgtccatagtacttgatatagatatgtataatacatatcaatatatttcttttaatggttgtgataatgtgatatcactgaaaatgacttgaaaaatttgcagttgaataactttcagattaacctaatttgggctttacacactcttttgtaaattaaatagcaaaaaatattttatcgtgactatgtgttaataattctttgtaattgaagcttaaacagggaaataaaagataccaatttctctagttgtacttggaaaaagacaagaactctctaagtttctgtggattgtggtggaaatatgaatgagatggtagatcctccattgaatttgtcagtatttgagtatctactttgtgcaagataccccattcattgttgaaaaggttttcaaagatgacagatttccctttgatgagagtatggtctaccaaagagatatcaaatgagactgtaaattgttaagatagaaggttaattaggctataactctcaagaggctggagttgtgatgctctgaactgttaacttggttgtggttacagaaaactgaaccttgtgagatgttccagtcctggagtgctgtgcatgcaaactcgacctatagcactccacttcatctcctgcccccagcccttataaatgttcactaacataaaaaggggatataaaataaaccggttttgaattcttgaaattacagttttaaaaactgttttttaatttgaatttttaagtaggaagctctgtcagagtccctttccctgtacattgcagtggcttggtacagccatcactaaaagtggctgtgctggaataaataaaggacttattttggagttttatggatgcttcctgtagaatcagtttaagtattgtatgtgtgttttgttttttctatctagttttcttccatgttgtgacttcaaaacataacatttcagatgttttagatcatcaaaacttatttccatggtaggtaaaaatgatattatctccaaaacacacacaccctcacacatacatttatggagagggattattaataagtgtggtatcaaattccaccttagccccttatctcaaaagtagtttttacctcataaggttatgaggattaaatgagttgatacatgtgaagtacccagaacagtgcctggcatataggaagcaccataaaaatctatgatcttattaaaaaaaattagggtgcaaaataatgtgaatagtatgataccattggttaaaaaggaggtttggatatatacctagaaaccagtggataaagaatatttctgggggaatcaacaaaactggaaatggtttctttgggaaaggggatcgggggtaggtagaaggagaacaaatgttttaccaacttttgaactgttctttttttttaaccatatatcaatttttaaaataatgccatgtttcaagtaatttaagatattctacgttaagacgagaatctatattcttttcagatggccctgctgtggcaccagtgaccaacgggaacacaacggtgccacccctgaacgatgatctggacatctttggaccgatgatttctaatcccttacctgcaactgtcatgcccccagctcaggtatgtgataagaatatggttttatatggtcactgcttatttcctttttgaaaagtttcaaaatttcaattttggaagaattgtttctgagcagtaactgatttaaaagtctcctgttctttaggctagagtttagcaaactaagccagcagcttgtttttgcaaataaagttttattggcacacagccactcccactggtttaggtactgtatgtggctgctttcctgctacaaaagcagagttaaatattaaaaacagagaatgtatagcccacaaaacctaaaatattcactgtctttaaagttctaacccttgctttagggaaacaacagtatttagaatgaacaagtggaaaaaccctgactacctcaactttcctgagatcaacaaggtcacttacttcagagcttttaaaactgtggctgtttgtaaatattgactgcagaagttctagcaaatttagtactgtctttttaaaataaaggcaaaatgaaggtaaattatgttttaagttagccttaaaatctaccttgcttttttttttaagtgattttttaaaaatctagaacagtaataataatgatcrggatattttaataaaagtattaatggtgaagaaattttgaattgccttcttaacattacatggaatttttgtaatgtgaactgtatgaactttcaggaaacaaactactcttaagcatacaacattaagattctatcttaagtttatactttacaaataaacaagcagtttgtgcagcataatttttgagataaaatatttccttttccatagaaaaactgagtcaaatctgaattgttctggtagacagttttaataagaaaaagtcaatgtcttataaggctaggaacatatttctgttgcacatatttattgttattatgatagtcattatatagttaccattagaatggaacaagtagatttcttaggaatgattaaatggatctttatcaaaattgtctgcagcagtagtgtttattttcagcaaaatagcttattttatggctttgccccttcttcccctcctgtaacacacataaaaaagagaatattgttactgttatttcaattaagattaattaccttacaaattggtacaggcataggtgtacatgtgacaaaattgtctaatattgtgtctttggaaagaagcatttaggatatttgacaaccagaatgtgaaaagccatttatttttagtctagcattgtagtgcggctgttatacctgctagacttatttagcactgtcactggggtctgacagttgctttgcaactgcttaagagagttagatcccacctctgaggtttcagtgtacttcacgtgttctgttctgtattaaagcagcaagtagaacaatgcagacttcgtttaattcttaagcacaagtagtgccatgacaaggagtgtagcctctggctttaagaggggtggcagctggccttcagactttaggcattctgagcattacctggtaggacatagggttaatttttaaaatcatatctaatacttcttttggaacactgttatgttgagcactggttagactgtacaagttatgttgagccctgtaaaatatttggtgaacagtagtatctttygtctaaacttcatgtagagattaaaatccagacatatttggccaggtatggtggttcaygcctgtaatcccagcactttgggaggctgaggtgggtggatcacctgaggccaggagttcaacaccagcctggccaacatggtgaaaccccatctctccttaaaatacaaaaattagctgggcgtggtggcgtgcgcctgtaatcccagttactcgggaggctgaggcaggagaattgcttgaacccgggaggcagaggttgcagtgagcggagatcacgccattgcactccagcctgggggacaagagtgagacttcgtctggaaaaaaaaaaaaatccagacatattttcaaaataatgcctttgaaaatgggggatggtgctgaaactacagattctatgcatatattgctaccatgtaatttagtcattttggtgggtttttaatatgtgaagttgagctcaaactagttgtggacaccaagattttgaattcttctgaaccctgtattctttcactccttgtgttattttctgagtatatacaaattctagtacaatattttctaacttatgaatatgaaatagattgattttaccatctgccttacctgtctggggtctagtctttcttaaaggggttagttagaaatacttagctgacaggagtgtacctgtgttttgggggctggagaggaacagttccagagtcttcattgttgacatggagaaacccctttcctgttctttcatatacatatacatatacatatacatatacatatacatatacatatacatatacatatacatatacataacaacagtacctagacatacacaagggctaagtcctgttttttcttggttaagcccttgggtcccagaaggccagagagccttcgattagatgctctgcagcttcctgaagtgtaaaatgagaggcagaagttgtttcccttttatcctggggtcgtagtgctggcgartggagcaccagaaagtaagtggacatttgagtgcttactagtcctgctgattggtttggctgtttttagactgtgtccttgttgaggtagatatttcatattatgatgtttacagtatgtgaatattaggctgctctactatgagagtggaatcatagcttcccaacattttgggttttcttatagttgtctcttatccacagggaatagaccccagggttttcagcagacttttaggttgaacagatactaagtgtgataaaaagatcacttagtgatgtagttgctttgttttataaacaatattaacaataaacaccaagtacttaatccaaccattgtgcagaacacttttgtgatcattaagcttatcccaagtttataggagagagactgaaaggagaagtaaagtaacatgtctgagtgtaccacagaaagtcatgggggcaggctctagtcctggcagacaggctccagcccatgctcttagctctaygatctgctgctgcttcattggtagcttagatatattttattcaggggtattgtgatatttagtattccatgatatctaatttcttacatatttgaatttttggaaaattaagcggctttttgtcgcttacaattcttgcttagtcataagattcaaaatactgtgtagtttataagtacaatgtttggatggtaacttattgcatggtgttctaggaggacattaaatgtttgaatttaatttccacttgcaactcaccttattctgtagtttgagaaggatcagccagcttttactagtcttcatagaattctttgaaactctcttcatattcaaaacaagtccatataacatgtgaatgtgatttaatgtttagtgactacggagatgattaaggttagcagttgtgattgtataatagtgtgtgcaagatatgagattgagaatattttatattaaatatctacatgtttatttgtatttgtgttcatttgcccccttgtccaaaagtgaagggcaggatatgttcagacaatagatggtcaaagttttgctgtaccttcatttctggatagattagaagcagtctaatattgtagttaaaactgattagatgtataaaaatcctatgatacaggttttgaaaagataaaaccttttaagtagccattgcaaatcctcttacagtctgttgtagttgtagaaatgttctttattccaaaggataccagtttcttgaagcagtagttgctatggagtggtggtcctctcatctctaactattgttgagccccaggatttgatgagcaaaaacttggtgtcaccttaggtagtaaatgcaacttactgtgaaaatgcttcagtctacctacattaacagattcaaattaagaagtactgtcttgattgtagatgtttttatatgggcttgggcttgtaagtgatcctcttgaatggcaccattttaccttctacaattgtttgattcctrtctaattttataactttatttggattttaagtaatggataagctgcgctttactatgcagaatttgatagcttattttggtgtttgtctcaggggacaccctctgcaccagcagctgcaaccctgtctacagtaacatctggggatctagatttattcactgagcaaactacaaaatcagaagaagtggcaaagaaacaactttccaaagactccatcttatctctgtatggcacaggaaccattcaacagcaaagtactcctggtaatgaattttgatatctgctttcagtgacattactagaagtacatcctttgtaattatrtaataagrtcaattatatatcttttattgttccatgtagtgagtgcttttgttgttgcagtttatacaactatgaagccgaaatgaatgagcattagaattaaaaaattaagaggcatgtacaggattcacagaactttatttggaattaacaagctgttcatagatcactaaatgttgtttcacaagcttatagaacatggattatctttgatgaattattgaaacgatttgcatgaagtttatgactgcgtacagtgtattttctctgcaggtaaacagtcttgagttaccacatggattaaaaaaaatctatgaatttttttgtaatcataacaaaatattagcataagccttattgtttacagagttttaatctttcacaccatttcctttaaaataatgagctgcatttcacatgtgagctaaaattgttgggcagcccactacacctattgaagcgagatatagtcagctctcacttccctgtttcgtactgggggaccagtggtacaaatcagcaataaaacagtgtatgatgtcatgctacatagtttggtcttcacagtggaagatattttgtgtggctgttgcatatgatttacatttcttaattaaatttactcaggttaataactgatttgtctgcatcctagaaacaaccagctctcagggtttaggtgtgggttggtctgagtagtaggagcagccaaactggaattaaaatgtttgctgtgagtagttcagaaaggcaatttttctgtgattatagagatgagtgcaactacacgtgatagctctgtcttcattcattttctttttgtggtgcaggtgtatttatgggacccacaaatataccatttacctcacaagcaccagctgcatttcagggctttccatcgatgggcgtgcctgtgcctgcagctcctggccttataggaaatgtgatgggacagagtccaagcatgatggtgggcatgcccatgcccaatgggtttatgggaaatgcacaaactggtgtgatgccacttcctcagaacgttgttggcccccaaggaggaatggtgggacaaatgggtgcaccccagagtaagtttggcctgccgcaagctcagcagccccagtggagcctctcacaggtaggggtcatttactttctagcttctcccaaatcaaaccagatttattttctaaatctttttttttttttttttttttttttttaagtctagtgatctggcagaaagaattcaatagggataatatgttatagggtcaaaagtatctataaatattatgaagttgtatcagatagacaaatgatgtgttattatcsctattttagagtattctgtaaaaaaaaggttaaacatctttcatttcaaattgtaatgtaactgtaacgtgaacaccactaatggccagaaattatctcaggcatcatgagactccctctctgtcacctctgagattagcactaagctttatccagcttgctggtgggacatttttacagtccacttagacaacttagcttcactaataattttaggatcttttattagaaaataaaaatctagcctcatattctcaaagcactattttatgagggatctaaggctrtttttcaggtcggatgattactgccccatggctctgtaaaaattctttttgttgagaaacctttgtaaagttgtattttctttttacataccctataatgacttttatgtttaaaaagagtacaaaaagattcaattcccataaggtgtgaaccagacatcccctcatattataaaatcctatttctacctaagttagagctgagatagaacatttctatttcaggtgctgwgttctgacttttctctagctgcacagacaaaggctcttagagaggttcatgctcccactcttcttccttttacacttcccattgatgttcctccagcattttggcaatcttggtttctgtttggtcacttgttttacctttagagcattcagggaatagtctagagtgatttctaacattagcacaatcacyatatatcacagttaattttgctaccaccatttacaagaatataggtaaaacattggtctctacccgctgggaatctaaaaaattgtatgtgctragtgtcagtcacatggtcaacatgctgaagcacacccagctcaggttaaggtgctagatgaaccaggaaggagttaatactggctcttacttccagataatgcagaagggtgatgctgttctccagcactccatcagtgcaatctactggccaaygacaaggtggttaaaatgtcctttagtaggtatgaagaygtgatctgcttcttcagacacttatgcctgattagtgatgtagtttatgttagtgtctttgaaactgtaaataagtcaagtcaaatgtattaaattaagaacacagtctaactctgagtgtaagttttaaacccactcactatatggtaaatcttgcctttccttctcttatcaccaattttggaagtaagagaatcacagggttaagatgcttatatatatatatatttgactccagtcttgaagaaaaatacatgtaatcttatgctttattgcatacaatgaaaataaattttagatgtttatgttgttagatcagcgagagaaataaatgctttatgaccactttaaaaatatttaggaagtatataagattttaatagagaataatatctatcatacaaagtttataggataattttagactattttacttcctaaaattttcttactccttagtagttaaagcacaatatcctagtgtaggtgaaagttagttagagtagcggactcattaaaatcccaagattgctttggtatttttttttaagtaagttgtggttaatctttggggaaactgtatctagaaagtagataaagaagggaacaaagtagctatttgctttaagaaatatttgtatggtactctgtttttattccagtgcttggactagttgtcacattaatgaaaaaatgaccaactgtgtggctaaagaaacaagaattaaaagtgaagtaagcctcttgaactaagccttttatatgtttcacagatgaatcagcagatggctggcatgagtatcagtagtgcaacccctactgcaggttttggccagccctccagcacaacagcaggatggtctggaagctcatcaggtcagactctcagcacacaactgtggaaatgaaaactgcaatacaagtttcatccagaactaccacctgacattccttgctgaaacgcatctagttcccctgtttattcatatgcatattttttttctttttacccatttgttcatattaagaawgatctgattgaccgtgttggtctgtactgaktcaatttgatgtggtgaaaagcaggttgataaatcattttatgtcaagggcagctttgctcatatttcccatgatttcatgtactgcattatttgagaagctgctcaacttgcaaaatcagttttcctctcaataaaattatagctctaatgtttgcatataagggaagtagttatcatgttagtaatacctctaatagtataaaccccaccccaaaattagccagtaatcctgtaggaaggtactgtatgatcaaatgtttaatcatataaatagaatgtaaatgtctcactgagcactgttttctagtgtatcaaaatgctcttatttcatcattcacttcactgtgctgttgttatgatgtgcttaacagggaacgtgattagtgaaaggaagataaacgtggatgttactccaaaacttcgtttaatgaatgcttaaagaattcarattttatctgcctctcttgtaatttggatctcttcttaatgtacatagtgctaacatgaagacctttttctgcactatatgcaaacagggtaactaactaaaacaaagccactttcaatcttcaatccttgaaggtatatctaggtttatgacagtaattgtgtttacattttatggtgcctagtattgacaaaatgttatttccctacattaaacatgactccatagaccttttcatttgtgggtttttatttcctatgatgtatactgccactaaccttccaaaaattacttagtattgcaaagtcaggaatcatcaggaacgtttagctgacaaaatacttgtctgttttaaaaacctgttcaagtctaccaacctgttcaagtctaccaattataagggcaaattggagaaaaagaaaaaatatatactcaagagtggtatcttgcagtatcggcactgtacaaaaaaatcttccaatttagttgttgtagagaaaacatgcagaacaaatgaagacaaaacatacattttgtaccaaccatccaattagcttatgttaactgacaagctccatttaaacagatgtccatcagatgacaagaaaggctgctgtactgaagtaaaacaaacaatacctgaatgctctgtagcctaaactccaaacatcctcttccatatggatccactggctggacaaactgcaccagttgctgcttcaatttatacctcaattttcactgtgtccaggtggtactttggctcgttggctagattaaccttctctgtccgagtgtgccacacgagaacctgaaggggaaggaaatagcttgggtagcgcactcttcatggtgacactcgaggtcgggcagcacaagtgtaatgaataccttagtgcagttatttgctttcggttccagttcttcgactgttgttatctgtttgagaaagtcagattcttgcatccctggctgggatccacgacgcttaaatmcagcttttggattggacaaaatgacttgaagacttacagcaaatcctttgtgaaaaataaaaaaaaaaaagagactttaaaatcctggtgtacttctctttttttctgtataattttggtcacatcaaaacagtttttaaaatacctactgtgtgtcaggtcttggtttacaaagttgaataggaacattacctgtattacagtctcaaaggaaaatcagtcattacaatattttacattccgtgtaaaataaaggcgtgcacaggagcatctacgcaaaataggaagtttagtctgttgataataaagggtgaattttataagctgctgtttcacagtgatcatcaaccccccacatttgccactaggaataactaagaaataaatgcagctgaaaaacatacatgcttacctaactacatgtggggtatgagaccacatgcccagctctcctgcctgccctgtaatattaattatgtatgcttccttaaatccagcactgcttggattcattttgcatttagaagagggagcaacagaagtaaagccgattagctggaaaatgaatcatacctaatttttaatcatctggtttatatttctaatttggttcaatctaaaaagggtatgtggggcagaaatcagtgcaggagatatcaggccatcatctgataaagtttttttttggtatttcatttaccaaaaataagtgtaaattttcttcaatggtttggtcatacgaaaaatcattactggctgggcacagtgtctcacatctgtaatctcagcactttgggaggccaaggcagaaggatctcttgagcccaggagttcaagaccagcctgggcagcataatgagaccctgtctctacaaaaaatacaaaaattagctgggtgttgtggcacgtggtgcgtgcctgtagtcccagctacttaggaggctgaggtgggaggattgcctgagcctatgaggttgtggctgctgtgagctatgactgtgccactgcaactccagcctgggcaacagaatgaggccctgtctcaaagaaaaaagaatcattcgtatttaatctgtagtttaacaaactgtttaaagctcagccattgaagcactctacaattgtttttgccatctcagcaagtaataattgttttgaaggtctgaagccctggatctctttttccttagtgactaaggtgatactgtcaagtcaggcaccctcccagagttgaagctccgggcaccaacccacaaaacatttctcagcaacttttgcccttctctacattaaatgagttgatttatgattcagtttgcaaagtaatactaaatgataccaggtggtaatggaggagctgtgaaaacaccacaaccaccatcctctccagatgccagactgggccagtctcctgttccagaccctgctgccttttggagaaaagttaacactaagccacttacaaacataacgtggtacagcaggtgctgagtgaagcagaacaaagaatcataaagcattagctgtaggactagccccagtatcgatacctccaccaaccctaaagggagggaggtggcacattttagcagagaatactggatttggaattagaagccttttgtttttgcctaggtccctgcccctgggacactggccaactcatttaacctttcttgattttctaacttccccatttctttatttgcgagagaagtgtaacacttcaactcaatgtttgatgaaaaattgaggtatggaaagactccactgactgcaaagcactgttcaaaagatactacaatatataaataaaaatactattgtcagtgtgatcatgaggggcaggtgatgccagccaccatttatggctgaaagaatactggttgacagatgtaaaaggtttgggaaagttccaggtagcaaagccaggacacctacatgtgatagcaactctggtaacaagtccacagccttccttagacacaactaggacaaccaccagacacctcaacaaaagccagaggttcaaattgataacgtagtgtcctttccaacaggtcagatcagattttagtgttaaaagatttcttgctttttcccacatgcttataaataagctttatccttttttttttttttttttttttaaattcagatgagagcctacccttctcagtcatactgaaactcctgatacattcttcacatggcttcaggatactggttgtatttccccattctctcaaaaacatgggatccaaattgtgcagaggtgatttctggaaatgatatggagccacctggatctgatttccttcattttcccctaagactttaacacattaaccatcacgaccactgaaggattcagattcttttgttgctttccttagcacaggaatatccttccagcgcttcacacagaatgacatggcaaaatctacaatttatgtaaagttaacagccagttgtgaagctatacatcattttgcagcaaggtctcctttcctggtgtcactagagaatggtgcgcacctgaaaggccagcaccctggagacatgttagcctgtggctctccacagtacccaagtgtttttctattctctaatacaaaggggtggaggagcacaattcagatgccccacaatcagctaacgcaatttcctttgctcagtgatctcttgaaaggaagcaggtcacagctggcaggagagactgcatgttaactaggtcaacccctgggttacttttggggaatctgacccgctgtgaagctgggggcagagttaaagagttctcccctctgaaatcacagtaaagggaatcctaaaccattgatttccaacctaagatgttttcttgggtaattccaagtatttatacttcaagtattatatctttccttttttagtgagattcgttatctttaaagatgttggttactttggagatgcttacgaaagtcatgggagtaggattttctgccctggtcagctgagtaaaaaaaaaaatgcaaataaaaatgattgttcactgagaaggcaggatttcctgacttcttcagcagagctaggtggggaggatacacagtcaccctctgtatctgcagatgcatctgcagatccaactaacctcagattaaaaatatctgaaaataaaacaaaaaaatgacaatacaacaagaaataatagggcttttttgtttttggacagagtttcactcttgttgcccaggctggagtgcagtggcacaatctcggctcactgcaacctctgcctcctgggttcaagtgattctcctgcctcagcctcccgagtagctgggactacagacgtgggcctggctaattttgtatttttagcagagacggggtttcactatgtcggccaggctggtcttgaactcctgacttcaagttatctgcccccctcggcctcctaaagtgctgggattacaggcgtgagctacagcagccagtcaaaataatacaagttttaaagctatatagtataacaacaatttgcatggcatttgcattgtattaggtaagtaatctagagatgatttaaagtatacaggaggatctgcctaggttatatgtaaacactatatcagggacttgagcgtccatggattttggtatgagtagcagtcctgaaaccaattccctatggatactcaggaataactattccctctcaggcagagggatagggcctacctccatatatgattactgattactgagtagaaaatttgtaagactttaaaagtccaacaagctatttacatttctggacaaaattgcaatagggactggtttttcctcacttgttttaaataacgaaaaggcagacaaaatgattgaaaaaagtttccagacattggaaaagaggcacatgagacagagatctctgagaaaagagaaatgtgacccctacaactgccccagcttcctgcctgaagtatgttttcaggctacaccacagggaggggaacccggaaagctctgcagtccccttgaattgaggaaacaactgagaatttgaggaggccaagacaactaggatatgcagggtggagtactagagaaggaagaactctgctgatctgtagacagctctcctcaactcttcaactgagtatgaagagcaaatgctcacacaactacctcaggccaggtacagaaccactggcaaggagcaggtgaatcaattactggaggggactagttcccattctcagtagccagagtggagctacctagtaacagctggagcacctggaggagaacttggaaggttatcgtgcctgttgtaaggtcaaattgattagccctaaactagaggctgagatggttttgcctaacaaacttcaaaagcaagcctggaaaggatcaaaatgtttccaagttaactcagttgtgtcccagtacaaagctcaagaatacatatgtatttataatatagtataacattacatatatatgtgtttttatgtatggttgtgtgtatacatatatgtctctctcatccagtatctagcaacataaaattcaaaatgcctgatgcccaagacacctcagtgatgaaaaatacaatgtctgagatgaaaaatacattggatgggattagcagcagaggagacactgcagaataaaagttgagtaaactcgaacacataatgacagaaactaccaaaatgaaacagaaaaggcaagaccaacacacacacaccgtacagagtcacaggaacagagtcaaaggtgaatgaatgagggagacagggaaaaaaatttgaagaaatgacgactgaaaaatttacaaacttgaaaactcaggaaagatatgtaagacttaaataacattttcaactacacctaaatgacatttatagaacactccacccaacaacagcagaatacaatcttttaaagtacacatggaacattatcacgatagttagaccatagtctgggccataaatctgtctcaatacatttaaaataatttaaattgtacaaaatatgttttctgactacagtggaattaaaatagatatcagtaaatacaaagatacctggaaaatatcccaaatatttggaaactaaacaatataattctaagcaaaatacaaaccaaagaagaaatcaaaagggaaatgataaagtggttaactgaatgaaaatgaaaacaagacatatcaaaatgtgtaggatacatctaaaggagtgtttagatgggaaactagtttttagaaaacattaagcacttactggataagaaaggtctgaattcaataacctaagctcctacctttataaattagaaaaagaaagcaaatgaagcccaaagtaaatggagaaaacgactatactaatagatatgagagcagaaacgactaaagtagaaatagaaaacaattgagaagataagtgaaataaaaacctagtcatttaggaaaaaaaagttaataaaattgataaactctacccatgcttatcaggaaaaagagaagatataaattaccagcctcagaaatgaaagagataggttctacaaaccttaaaatgataatatggggctattataagcaactttttatgatagtaaatttgacaacttagatcaaaatagaaaaagtccttgaaagacaagctacaaggctcactcatgaagaaatagataatgtgaaatagccctgtatcaaataaattaagtttataattaaaatcttccacacacatacacacaaccctccaggaccagagagcttcactggtaaattctaccaagcatttaaggaagaaatgacagcaattctacatgaatttttctagaaaatagaaaaggaggaaatctttctcaagttatcctgtaagaccagcattgccctgataccaaaaccagacaaaaacattacaagaaaactacagactaataatcctcatgatcacagaaaaattctcaaaattttagcaaatcaaattcaacaataaaaagacaataaatcatgaccacttgaggattatctccagattgcaatgttggtttaaaatttcaaaatcaatcaat

SEQ ID NO: 95575 - DNA, 16438 bp, Homo sapiens
gaggatggtgtgaacccgggaggcggagcttgcagtgagctgagatcccgccactgcactccagcctggggcgacagagcgagactctgtctcaaaaaaaaaaaaaaaaaaaaaatcaaggttttggccaggtatggtggctcacgcttgtaatcccagcactttgggaggccaaggtgggtggatcacctgaggtcaggggttcgagaccagcttggccaacacggtgaaaccccgtctctactaaaaatacaaaaattagctgggtgtggtggtgcacacctgtagtcccagctcctcaggaggctggggcaggagaattacttgaacctgggaggcagaggttgcagtgtgctgagattgcaccactgtactccagcctgggtgacaaagctagactccgtctcaaaaaaaaaaaaaagtttttcttatctttcttttttttttaattatactttaagttctagggtacttgtgcacaacgtacaggtttgttacatatgtatacatgtgccatgttggtgtgctgcacccattaagtcatcatttacattaggtatatctcctaatgctatccctcccccctccccctaccccacaacaagccctggtgtgtgatgttccccttcctgtgtccaagtgttctcattgttcaattgccacctatgagtgagaacatgcggtgtttggttttttgttcttgcgatagtttgcttttttttctttcttttctttttctttttttttttgagacagggtctcacccttttgctcaggctggagtgcagtagcaggatcttagctcactgtaacctccacctcccaggctcaagtgatcctgccacctcagcttcctgagtagttgggcctacaggcacgaaccaccacactcggctaattttttatttttattatttatttatttttatttttttattttttggtagagacagggttttgccatgttgcccaggatggtctcaaactcctgagctcaagtgatcctcctgtctcagccttccaaagtgttggaattacaggcatgagccactgcgcccggccaaaatcaagttttaatgtgcttattgcatgggaaaaagaagtgaagagagttattctccaaaagggtcacatttgttctaaatctttgtgtggtggaattgaaaacaatgtttttccatttgttctctttcttttttgttttttcgaggcagagtgtcactctgtcgcccaggctgaagtgcagtggcacgatctcagctcactgtaaccaccgcttcctgggttcaagcgattcttgtgcatccgccaccagagtagctgggagtacaagcgcaggccatgatgcccggctaatttttgtatttttagtagacagggttttgccacgttggctaggctggtttggaactcctgttttcaaatgatcgcctgccttgttctcccaaagtgctgggattacaggaatgagccactgcacccagccttccatttgatctcatttctaatttttctaaaataaacatggattatttatgcaataacaaaaagaatgcaaaaatgcactcaaaaatgcgcctctttggagaggctcctaggacagggaggattgagggccaaggcacttgccatctgtttatctgggagcagcacaggcttctctctcatttcctaggtcatctcagttcttaggagagactggcctgctgtttagagataggagagactggcctgctgtttagagggaggccctgaggccctgatagtgaagaagcagaagtagacagaagtgaagcagtatccattttgtctgagacagctggagagggccatcaggcaggacagaggggagtgaagagggaggaagggtacaaacagcagaacctgactggtggatgagaggatgggagtagaggggtgaaggtgggcagtcctggcagctttgtggacgtgtctgctccgagacagcaaaaggatagtgggtgcccaaggagacaagtgccagcagggactgagcatgtcccatggcaggatggcagtgcaaggctggggtgtcctttagggtggctggatgggaacgaagggcttcccctctcctctcctcaacttcagttcagaggaactccacaggcatcagatgtgactgccttagaaaccaaggcagtggccacagcaccaaggaaatgggacgttagagtcagcaaggtcattaaaagagaataaaatggtcttacctatatttaaaataggtaacaggctgggtgcggtggctcatgcctgtaatcctaacactgggaggccaaggagggaggattgcttgaggtcaagagttcaagatcaacctagactaacatagtgagaccccgtctctattttatatatatattttatatatacatatatttgggtttttttttgttttcttactttgtttttattttttgttgttttcttttctcttttgctcttttttatttccatcttatatttttaaaaaataaaatataatagattttgtatatataaactttaaactttggagatgaaaaaataatagatcaaaactaccacaaaaaagaacagtttgtggtcagtggctcacttgctgccctaagtccaaactgaggggagcaagtgcttttgctactccgtgtcttatgtggccagtcctggctggggatgaagccaacactgggggtcaccaacatggcctcttttttttttttttttttttttttagacagagtctcacactgtcactcagcctggagtgcagtggcacaatcttggctcactgcaatctccacctcccaggttcaagcaattcccctgtctcagcctcctgagtagctgagattataggtgcccgccaccacatccggctaattttttgtatttttagtagagatggggtttcaccatgttggccaggctggtctcgaactcctgacctcaggtggtccattcgcctcagcctcccaaagttctgggattacaggtgtgagccaccgcacccggccatcctttcttaggcttttgcagttctcccatttcaccctggctcccggaagcggaaacgggagatatcaacgcaaggcaaccaggtaagggatgggtgtatgtaaggggtcagaaaggagtgagacacaagtgtcccccacacctcactccaaaacacacattcagcttcagcacaacctcctgtattgcaggtcagatccagagctccccacaacagaccacagccaggaaaagcaaagggccctgcagtgccctggtggactatggggagggtgagtatcctgcagaggagcaggcagcattaggaagttgtgaaggagggtaaacccccaacttcctcactacctgacaaagactcctctacaacaaaagggaggccaaatgcaggcaaacagaaatgagacaaagagaagaggggaagtgctggcagcgcagtgttctagttccattcctgaggtcctgctctctgtaggtgccccttctggtctgtgagctcccctgtgcctctcccaagcgctgtacagaagccccccttttccttcagccagtttggtttctgctgggtttctggtttcagagctttacgctggtaaccattaggctatgctgcaacatggcagctatgggagctcttaaagccccaaaccactggaccttacaaatctcacttctgggagtcatgttaagaaaataatgagtcaggcaaagattttatcacaataatatgaacaaaaatttaaaaaattgaaggccaggagtggtggctcatgtctgtgatcccagcactttgggaggctgaggcgggtggatcacctgaggtcaggagttggagaccagcctggccaacatggtgaaaccccatctctactaaaaatacaaaaattggccaggcgtggtgacacatgcctgtaatcccaggtactcggaaggctgagacaggagaatcgcttgaacccgggagatggaggttgcagtgagccgagatcatgccacttcactccagcctgggtaacaaagactccgtctcaaaaataaataaataaataaaaataagaaataataataaattgatgttttatgaggacaggaacttgtctgttttgttcatagctatactcccagaacctggctcagtaagttatctattatataaatcaataaacctaacattgacctttgaatggttaaatcagtaaggtacatacatataataagtagtcattaaaactgtcttaaataacttttcagtgacattggaaaatgctcatgtctactagagaaatttcaaaactacatgtacatcatttatttccaatgatggagaaagtagatatgcataggacatgatagtgtaaggaaatacaccaaaaatgtttgtaagaaactatctttgggaagtatgatgtggatgattttatttttacttttatctccaaactttcttcaatatgtctgtattacttttcgaatttaaaaaatacagaggccaggtgctgtggctcacgcctgtaatcccagcactttgggaggctgagacaggcagatcacctcaggtcgggagttcaagatcagcctgaccaacatggagaaaccctgtctctactaaaaatacaaaaaattagccgggcgtggtggcgcatgcctgtaatcccagctactcaggaggctgaagcaggagaatcgcttgaacccgggaggtggaggttgcagtgagccgagatcgtgccattgcactccagcctgggcaacaagagcgaaactctgtctcaataaataaataaataaataaataaataaaacatagcattattttgcttaatagtaaatattatatttggtcctcactttaaagggtgcacaaactgagggcctggggacttgctcagggaagttcacagaaagcagccccttgcctgggagtgggggtgtgcattacacggaaaggactagaaaagctagcagagagaccatgggaactaagggtcctcagctcttctgagtcctctaggaacgccaccttcttcctctctacttctgtcatttgttccctgcggccccttatatttactactgatagaaaaggaaacatcacattggtggagcttttaaaagcaagagacaggtcgggcgcggtggctcacgcttataatcccagcactttgggaggccgaggcgggcggataacctgatgtcaggagttgaagaccagcctgaacaacatggtgaaaccccgtctctactaaaaatacaaaaattatccggtcgtggtagcgggcgcctgtaatcccagctactggggaggctgaggcaggagaatcgcttgaacccgggaggcggagattgcagtgagccgagatcgtgccactgcactccatcctgggcaacaagagtgaaactccgtctcaaaaaaaaaaaggcaagtgacagcaaggggctggggggtgcgggatcgcggaagagtcggagactcgaacttgtccttcttgtatctagtttggacaaattcgcgagaaacactcaagttcaagtgaataagccgcggctgaccaccctggtgccgcctcgccgccacctggtytgaacctcgccgccacctggtctgaacctacgccaggagggcctcgttcatccccgcaaatcggcaacctggagaattcctgtgggccttgaggggcatctgatggccagcgccagaaataatattagccaggcctgggccaggcctcagccctgagcccgaggtggcttagggacggcgacctcagccttggggtggggggggggggtgggggcggccgggcgtcctgggccggcgggcgcctggagctcacgccaagctgccacaggggcttccgggactccagcccggagttccgccctccagtcgcgagcggaggaggcgggcacgcggcctggctcggccgcggattggcctgccccgagatcctggccactgattggtcgcccggacggggcggggccacgtggcctaaggcgccatcagccgcccgggagatatccgccgggggagaatagggttgcaccatcccagaagctgctgttagctcgccggtcctcggcacgccgcccgttcgcccctgcgctgtccgcccttcccctagcgttacttccggtccctcgctgagggggttcgtgcggctcccaggaggcgtgaaccgcggaccatgagcgtgggcttcatcggggccggccagctggcctatgctctggcgcggggcttcacggccgcaggcaagcgcgtggaggcgggaggcggcttcgcgggcggtcccgaggcccgagggggcctccgtcccaccagcatgagcgaatgaaaggggagtttgcgtccggtggggtagatgagactctggttgagcagcaagtgcgtcttctgtcctcgtagagggttgagggggagagggagactggcactgttaggacggctctgggttttagagccagggaaagcgtggtaacgggctgggccgcgacccctakttgaaaagctctgtcttctgcaggcatcctgtcggctcacaagataatagccagctccccagaaatgaacctgcccacggtgtccgcgctcagggtaggtggagccgggcggagtgggaagcgggtggaggcccaggaaaaggatgacctgagatgaagtgagtctggccggcccctgcgcccwagtgctggtctttggccggcggtgacctttactccaggaacgtgacaatctttccaccttctcttgggcagctcaatgtggtgggaacacccagggagacataactgggggtcagatccagacactggagtggtagaggattaactgaggtgattatgtgatgaaagcacctggcacatagtaggtacctaataaatactcattttttaaattttttttcagacagggtcttactctgtcgcccaagctggagtgcagtggcgcgatctcagctcactgtaacctccgcctcccacctmagcctcccacctcagcctcccgagtagctggaattacaggcatccaccacgcgcagctaatttttgtatttttggtagagaatactgttggccaggctggtctcgaactcctggcctcaagtgatctgcccgccttggcctcccaaagtgctgggattacaggggtgagccactgcgctcagccatttttcttaatagacgagttgtatgaccttaaagtactcagccactttgaggctatttcctcatttacaacagtggccactttgctgttattctgagtcgtgaatgagcatattgggaagaatctggtgagttagttgttctgttctccaaaaacatattccaagtcttcacccaaaacctgtgctctgtgggagaggatggctgatgaggcaggtgacaggcagtgtctgtgcctagggtgggctgatgtccctagcactggagggtcctgcttctcagtttggagtcatagagggatggatggcttccagcctagccctggaccacatggagactgtgcggtccccacgaacaagcggccagggttaggatagggcctgactcagctgtgcttttaacgaccaggtattagcatttccctttgccctgccactttcaccatagggccttcttacctggcagaggagtgccttagataccagaagattggcagggaagaagggcagccacttcctggttaccatggagaagcttgtcatgctccaagcctgtgcttacttgtccagtagcaacaatgggaaactgtattatttggggtaggggtagaaccctgagggcataaagctaagaattccaggctgcatctggcagaatcggtttggcaggggttcmgctgctccctgggaggccttggcatagccaggctgctccagcactgtgagctgggagtctcctcttgcagaagatgggtgtgaacctgacacgcagcaacaaggagacggtgaagcacagcgacgtcctgtttctggctgtgaagccacatatcatccccttcatcctggatgagattggggccgacgtgcaagccagacacatcgtggtctcctgtgcggctggtgtcaccatcagctctgtggagaaggtgcccatctcagccctgatgccccttgtgtgaggggagggttgacccacgaatggcagctaatgggtgggtgctggtgggagccgtgccctggccactmattcggctctctccctcaccctagaagctgatggcattccagccagcccccaaagtgattcgctgcatgaccaacacacctgtggtagtgcaggaaggcgctacagtgtacgccacgggcacccatgccctggtggaggatgggcagctcctggagcagctcatgagcagcgtgggcttctgcactgaggtggaagaggacctcatcgatgccgtcacggggctcagtggcagcgggcctgcctatgtgaggccctcatttgctcgctcagccttctaggaacccaggcagcaagatgggctggcaggcaggcttggactgggggtggcgcccacctcttgggcacagctggctggtacaggatgctgacccttggagctagttctagtcatcagaaagcagacctaaggaaaggcccttcagtgcctatggcctggggcttagtgagtgtctccacaggcattcatggctctggacgcattggctgatggtggggtgaagatgggtttgccacggcgcytggcaatccaactcggggcccaggctttgctggtcagtatctttcccccgcatgttcaggaccagggtgtagaatgggggttcttgtgcatcactgaactgaggtgggagttggttgggaagctggggtagcagttgggcaggagcagtgggtatgggaagcctgttccaacgcacaccagcaactttctcctaatgtgcccttccccatagggagctgccaagatgctgctggactcggagcagcatccatgccagcttaaggacaatgtctgctcccctgggggagccaccatccacgccctgcactttctagagagtgggggcttccgctctctgctcatcaatgcagttgaggcctcctgtatccgaacacggtgagtccmtcccrcggacttctgtcccagacccttcagtcctggttggtccctgggctgggttgagcaccatttgcggaacctgctgtcttgggtcccatttagcagtgttggagtctgtgctctgttaataaccacaacttagtagattttgtttacctaagagtttgcaagccttacttcacttaattctcactgcatttcagataaccaggattaactttgacttgtagatgggaagttgaggctcagagataattttcccaaggtcaaacagttaaaaagtgatggagacaggattctaatttgaatctatgactccaaagcctgtcactcttcccgtgtgatcacagataccacttggggctctgatcaaatgagataaataagcaaaccctaacttaggtaactaatacttcttagaagtactagttgggaagtactagttgggaagcgtttgtcttggggctctaatttttggtggtgtcacatcaacaagcttgagggttgtgtggatagtggagactcaaagctctggccccagggtttattgccttcctttaatccttctggggttttgtctgcagagagctacagtccatggccgaccaagaaaagatctccccagctgcccttaagaagaccctcttagacagagtgaagctggaatcccccacagtctccacactgaccccctccagcccagggaagctcctcacaagaagcctggccctgggaggcaagaaggactaaggcagcatctgtcccctctgtgattcagagcccttagttgagagcccctgccgcccctgccacccccctgccccgctcccaccattgcccctcctcagctgtgcaaggagaaagcatgcttaggaagttttcaggtccttgtgataaaacctccttaaatctgttcagaccaagcaatgcgagcttcctctcctgtcccatgttggaagttgctctgaaggggtggtagatgctggaagccagacacaaccctgcgtacgctgctcagttggtggagactggggctgggactggagtcagcccagctgggaggaggggctggggaggatctgcagctgaagcccgaggcagggttggtgtgatsccarggcaaagtggtgaggagaaaacaggaaacgggctttctctgaattggtaaatgggaaagaagtgagcaacttaagattgtcacaattaatcacaagtgtacaggattagactgggtttatatttaactcttgcttcataggtgtaccatttaaagagtgttatttaatgctaagtttaactgctttaataaagtttatttttaaatatcttgcttttgttaggcttaatcttaaataatcatcctggagaacttgatgcccttgtgaggtcctccctgcttctctgcgagagcactgtccaagggctagaagtagggatgagaggaataaggggccaggcccttggtctggatcaaggtgttgttctagaatgagccaaagctaatggcagggaagagccaagtgggctgcatgggttgtgggtcagcagcccagaataaaggggaaagccgtctgctttgatgtggggcaggcactgtgctgagcatttgatcctcacagctgccctctgaaggaagaactgttcttttctcaccgtatagatgtcgaggccagccaggcgcagtggctcacgcctgtaatcccagcactttgggaggccgagccaggcggatcatgaggtcaggagatcgagaccatcctggctaacatggtgaaaccccgtctctactaaaaattaaaaaaaaaaaattagccgggcgtggtggtgggcacctgtagtcccagctactcgggaggctgaggcaggagaatggcgtgaacccaggaggcggagcttgcagtgagccgagatcacgccactgtactccaacctgggcaacagagtgagactccgtctcaaaaaaaaaaaaaaaaaaaccatctggaggcctagagggataagcaacttaccccatttgtgctgccggtcagtggtggggctgtctgtgttcttagctatcaattctgcagcctcccagaaatagctgggcatgccatccacatagccagacatccagtgtttctctaggcaggccggtgtgtgcctggtacttgttcctacgagctgcctgcctgtgcagcagggctgtttgaaaaggcatgcgaggccgggcgcagtggctcatgcctgtaatcccagcactttcggaggccgaggtgggcagatcatgaggcagagagatctagaccatcctggccaacatggtgaaaccctgtctctactaaaaatacaaaaattagccaggcatggtggtgtatacctgtaatcccagctactcgggaggctgaggcaggagaattgcttaaacctgggaggcggagattgcagtgagccaagatcgtgccaccgtagtccaccctggcaaaagagcaagactccatctcaaaaaaaaaaaaaaaagaaaaaaggtatgggcattggcatcagcatcagctctgggttcaaatcttagattcccctgctttctactccacagcccgggagaagttaccaaatttctcacagcccgggagaagttaccaatttctctgatctcagggtttcatcccttataaatatggagcccatgtttcatcagggtgttaaatgagaccatgtggcagtgctcaacagaacatctggaacaccatggccccttcgtgtaaatggtgttcttccttcaccctcctgctgagaagagagtggagccttgttccattccactgagtcagggcagccccagctctaactccaaacctgagagcacatgggaagtcattcttctgggccaacacagcaagtgcaatactaaaaactcatttaaagtccccagtatgtggccggccctttgcagacacttcacacatactctcatggccttaggagctgggtatatttttttttttccccagaaaagtgaggctcaaagaggttaaatccaagttgcccaaaaagatttgaacagacatttcaccaaaaaagataaacaaatggtgaagaagcacgtcaaaagatgctcagccttaaaatagttattagggaaatgcaaatcaaagcccaatgagataccacttcacacccacaaatatgactgttcttggttttaaaaaaaatagcaaatgttggcaagcacgtggagaaattggaacccttgtgcattgctggtggggatgtataatgatgcagccactttgggaaacagtctggcacttccttaagagattaaacaagctgggtgtggtggtgcacgcctgtagtcccaactactcgggaggctgagaagggaagatggcctgagcccagaagttcaaatccagcctgggcaacatagcaagagcctacctctaaaaaaaagagttaacaaatgactcagcaatttcgctccaagttatacagtgaagagaaagacttgcgtatgaatgttcatgacagtgttattaagtagccccaaggtagaaacaacccaattggtcatcagctggtgaatgggtaaatatgttacacccacacaatggaatactcagcagtaaaagagatgcgagtacagacacatgaacctgtaagacatgccaagtaaaagaagccagtcacaaaaggccatgtattacatgattccatttatatgaaatgtccaaaaaatgcaaatctatacagacagaaatagaagttgccagggactgtggtggcaatgggaagagcgcagagtttctgttggagccatggcaatgatgtaaaataagatcacggtgatggtttgcacaactccatacatatggtcattgaattgtacacttaaaagtgggtgaattttatggcatgtaaatcatacacgataatgtttttaaaaatgaaataagctgcccaagttttaattagctaggaagtggtgccaggattcaaatctgttatctgataccaaatcctatcctctctgtgctaggcctgctggcaagtcatcctagatgacaagagattgttgcctgcattttcctctcctccatcccctgcaagaccacccctttttccaggcctaaatataccaacatacatttactgaggacctactgactgccaggccccatcttatgtcttggtgcacggggtcaccctggctaagatgtgtcctcacctgccgagcactgctgcccttcccttctgaacttcagtcaggtatgatcagggccagatgggaatgagggtggttgaggccctggtcctgcttcagggagaggaggagagggccattccttggagaaaatttccagtcatctctccccaagacctcaggcctgtctggggaggccaggaagtacccaggacttccgcctcccagcttcccaccttctcacagggctgatgagccttggggccagagctgccggcagtcagtgagggctggcaactccccgaggtggtcaagagagcccccagtgtgtcaggccccagacagaggcactagagcttgcattctaggcccatcaggtgtccaagccaccaggaaagcaaccagatacccctgcaagagctggcattgagggttagcgcagccttttcactaaggatttgctgaatgctcctctcagtgccctgtgaggcctgggtgtgccctaggcagtcagactgtcctggcccagcgcgatggctcacgcctgtcatcccagcactttgggaggccaaggcaggcaggtcacttgagcccaggagtttgagaccagcctgggcaacatggtgaaaccccgtctctacaaaaaaaaaaaaaatgcaaaaattagccaggtgttgtggtgcatgcctgtggttccagctactcggggtagaggtaggaggatcgcttgagtccttgaggcggaggtcgcagtgagccaagatggcatcactgcactgcagcctggcccacagagcgagaccctgtctgaacaacaaaagactgtccttgttcagagttgtacaagggctgagaacagatgtggacaccgcaatgtgacaaatacgggaagcgagagaaggcagcctggagtggactgaaagtaggggagcgtgctgttgggaaagacagcctcagcctttctgccccctctgaaaggccacatgagaatgggcctggaacattcctcacaaagagctaaagtgttctcaagcctgtggtggacttgtcactttgcatgggcgcgtctttcctgtttagacttgatgtatattcctttagtctgcttaagtgtgcatcacatggcacctggccaagcccaccactatatctgttcccactggggaggggcaaggtccttctgctgcagcacagagaggtgtgtgcaggcccatggccctgggttaccgctgggagggacctgctggccatggggaccaacacccaccactgaagctgtgttcgctgctcttttctagtatgagtaaagtggagtagcccgggcttgactgtgctgttgcccctggcaactccagttacgagactcagtgagcagaagtgctaggatttctgctcctgataataggcaacagatgccacttgcgcacaggaaccagccccctctccctgttcccagctccctgcactgccctcttctcaggacccctgagcagcatagccttaagtaccccccaatcccgatttcccagtgggtgtctcttaggaccccagaaaaacgcttccttacctattgcctccatgttactctcctataaaatggggcaaactattgccccaactattaatgatcattacttcggggaagtaggattgagattgacttttcacttaatttcttgatttctttattttactttagattgttgattgcagtaagccggcatgattttggtggttaaaagatctaaagatttttcccactgctcccactcgtggggcatgctagaaaacaaatgcaccctccctcatctcctgcatccttctttcatccccctgtctgtgcgtgtcccctgcaactgttactaagcaacgctctccaaagaaacaccgagagtcagcctcagcccaaggggctggctgcgctttccttcactgtttcaagcaggagagctagtcctttctgcacatctgagcaaaatacttgtaaagccttgacttgtattcacttttaccaataaactagatggaacacagaagtggatattgtgattatatgaagtccatagcattttgaaaatgaaataccccgcttttcaaggtccaagccagtgtgggtagtatactacctttatgtaagaaagggggaaaatacaaaattggataaagaaattctagaaggatataccagaaaccactaaaacagtacctggttgtggggggcagtgggaatgtggcagataggggcagggcaggagggagacctttcattacaaacctctttgtatagtattgatttaggaatcacataaggggattgcttagttacaaaatgcatttggacagcctttagaggggccaggctgccctggccatgcggtactgaagcaggatgcgtggccccacgtggtcagtcaaggtgggagcacgtcctgtgtgccctactttggcctcgagctgtgtcttggacactcctgcaggaacacttagcatgagagctgggctgcaggccatcttcccaatcctagtgcatggtacccaataaacacagctgaacaaatgcttgaatgaatgacagctcttctgcttgaatgtcaggttgggctgttgcctgagtgcccaacgaggtctctggtgtattggggtgaaaactctgtgcaactcctagactgtccttggacctggtcattcctggtttggttttttaaagtatttatttttttgtttatttatttacttatttattattttttgacacggagctcaggctggagtgcagtgtagatctctgctcactgcaacctccacctccctggatcaagcaattctctaatttttttggtatttttagtagagacggggcttccccatgttggccaggctggtctcaaactcctgacctggtgatctgcctgccttggcctcccaaagtgctgggattacaggcatgagccactgcgcctggccctggtttgtttttgactttcttttattcaatcagcaggtgttgattgagcactgaagggctgtgcttgtgcccgattggctgggatgtggggaagcctagtacgtttctgtcctggccactttgcctcatgggtgctctatgagtgtgcctgctcctccccccgtgtgttgcccaagag

SEQ ID NO: 95576 - DNA, 246385 bp, Homo sapiens
atgaaagaagcaaaccaaaagatgccgctaataagtcttctgttcactcaatacacaactattattaatatcagagaatttttgaaatctacattatgatatacacaactctgaataggagagaagatagcagtgtttcttataggccagtgctaacaaaaacagctttctatgatgaaggaagtattcattttgcgatctctaatatggtagccactagacacaagtttctcttgggcacttgaaagacagatagtaccaccaagaaactgaatttttaatacatattaaatttaaatagtcatatataactaagtggctacatattagggcaatactaaatctgtatttcaaaaatcaaacccaacttttatcttctcatttccttttggtttcataaagtatcataaaggtaagaagggatgacagaagtgtaaagactggatttatgtataatgtcctatcacttaaaacctatttctataacaagggctaccatttatatttaccatacctatgtgccaggcactaggatgaaaattgtattaatgctacagttatcatcttatttgatccttataacaacactatgaagttattattgctaaacattatatatttatatataagaaaatgaatgctcagaatttaattattcccttagcactccttctcacatcagctattgtaatgactcctttactcacctctctgcctctaatctttcctggataaaatgcttaatgttacacactgacatgagagtggtcttacaaacaaataccatttccaatcattctctcctgctccaccaatccacattcatataccattactttttcttagcctgacatataaggaagggatctcagaatcctttcctcttcatagcagcccttcagggagatctttataaatcaattgaaaaattactaacctacagaataagttctaggtctttactatctggacactcccctccctcttctttcctctgtctgcagtgcctgccacttcatttgtcagcagctactctttattcacaaatcagccatggactccgttcattttttcctcaaccaaacagtgctaccaggtaccaggccctactcaggttaatgggaatatatctattttagaaagttaactcctttaggaatggcatttcaataagcctatgacatccactcctgtttataacacaactattccaaatccagcttacccaccgacattccaatttttaaatttggtaactatatgcctaatattccaaagtggctattttaatatttttacttttcaaaaacaaaacaaaaacataccccttcttcagacaaacaagcaagacgatctatgagttcggggttagcagttaggctctttacatattcttcacctgaaaaaataagtttatgttgtttttgataagtgttttttccttagatatgaaaaaaatggatagtcttgtttgcgacagtatacacgtcattctttcattcattgagacacactgagagtctcactctgtctctcaggctggagtgcagcggcgcaattacacatcactacagcctagaatccctgggctcaagctaccttcctgccttagcctcccgagtagctgggactatagttacatactaccatgcacggctttttttttttttcctgtagagctatagtctccctatgttgcccaggctggtcctgaactcctggtctcaagcaagcctcttgccctgacctcccaaagtgctgggattacagcacctggcctcaatttatttaaaaaacaaaacccaaaaatctgttgatgtgatcatacctaagcagaagcaggggttccagtatatttatgagatttcattgctaaaccagttgcaaatagtgaggggaaaattaacagccactgggcacaacatatttaggttaaaaactatgtgaaatttaaaaatacaaaaatatcacatgaagttatataggactacgaaaatactaaatagtaaagtgaacatctgactataggcctaatgattatttttacacgcatttgcaaacatgcactaagtacttctacatttagacttacaagtgaaagctggtattccttcttctatggctttctctttgtttctcctgtcatttgttatgaagataacttgcagctggttgtctgctgacatttttttcaaatgttcattgtaccattttgctgctactcgaatcgctctatcattcctgtcattagcattttctccctgttcttgttctacataggtttctctaaatggaaagaaaaaacgaaataaaaggaaatcagtagaaacaaggatatgtgaaaactcttagcacataaatgcttaaccactaaactagaaaaagtcaatggtatatcttttctcttgaatgtattcagatgtacacctcagagaagaaatcaagattcttataattaagtttttaagaaacaatttgcttggaaaagaagaaaattatgttattaaggggacaagaaaaaggctaatacaattttatttcctaaaaagaaaaattcaagatcagaatttatactttaggttgagacactaaataatagtttgttgacaaattataatacaatttcacaggtatgataatcagatttcattcaaactgtaggttaatagcaattcctaaaagctacaaatagtataattagatcatttataatcagaattctacagtcattaataaataatgcatataaattatccatggtaaacactaatagctgaagctatgtagagactgaaaagtcaggtatattaatagatattacgtatttcttctatctaaactcccaagtatgtcaacacattcatctatttctttaaatctgttcatcaaagccaggtttaagtacaacagcaaagttcactacaatagcttccagtacttaatggtaatagattcaatttaataatttgatttatattaatagttttagaattattttattcctcatcgttgaatgcacttgctaatgctttttttttttttttgaaacagagtcttgctctgtagctcaggctggagtgcagtggcatgatctcagcttactgcaacctctacctccgggttcaagtgatcctcccaactcagcctcgcaagtagctgggactagaggcatgtaccaccataaccagctaatttttgtatttttaagagacagggattttccaggttggctaagctggtctggaactcctggcctcaagtgatctgcccacctcaacctcccaaagtgccaggattacagacataagccaccacgcccagctgctaatgttttaagctcatcagtgaaagacacagtcataaatttttgaattggttttaaacttgggtctttctgcactgaaaaacaagtgatgttgctatttctggatttcaaggaggtactaacaataagaagcctacaagggctttactggtattctttacaagaacattgaagtttgagatataagaatcaagaaagttgagatattaaggtttttaaaaatgtgcataatctgatggaatttcattaccagaagtctacactctaatccaatggttctcaattgagtgaattcacccctcagggcattttgtatcattacaactgagtggtggtggtggtggtggtggtggggggggtaaggggtggtgatcctgccaaataggctaggaacactgttaaacatactacaatgtataaaacagcctttccaccacaaaaaaattattcagttcaaaatatctataatgccaagattgagaagccctgatctaatccaataaaagtaccatactcatcatagattatttatgtaatataacgtaataggcaatatcatatttttgagaccacacactgagttcaaaggtcttgaatctaaaagcacaacaaagaattatattcctggccaggcacggtagctcatgcctgtaatcccaccactttgagaggctgaggcaggtggatcacgaggtcaggaattcgagaccagcctgaccaacatggtgaaaccctgtctctactaaaaatacaaaaattagcctggcatagtggtgcgtgactgtaatcccagctactcaggaggctgaggcagaagaatcgcttgaacttgggaggtggaggttgcagtgagcagagatcacaccactgcactccagcctgggtgacagagtgagactccatctcaaaaaaaaaaaaaaaaaaaaaaaaagaattctattccttaacctaatcttgctcaatgtaatcagctgcaaagtattaaacttttaaaaagaccattaagaataaatctactttctatttttaaacaaaatagaaacttcacaaactcatatattttattaccctctgttagttgttcacataatatggtattccaggaacttaagcaaatctcatcttccaagattctatggtccaactcatgctaaaaccaattcaaaatgaaaacattttggaaattaaagtacctattgtagtctaggagtcagcagaccttggttttaggcttgagcccatcaatgcctgtgtgaccttagagagatccacttagcattatcttctgcacagccatgtaagaattaaataaggtatgaaatctatcacttatcttctgacaatgtcataaattactcacaggaaccctctcccgaattttgctaatcctgtggttttctgatatttaacgtaatattcctcctacctatggtgctcattagtgaaagtatagaaatgcttctcttggttattagtcacatctcggatgcgtttatatacgggggcactgcgatttctcacttcttgaagaactgtttgtagcacaattacattcctgatggcagggtcctcaagaacatcaatcttaaagaaagataaagttaatttttcctatattcatttgtaaatagctctgtcaaacataaaatcctgttttatgttgggcataaatactttatgttttaaaaacactgaataagttaagccaagaagctatttggctatagaaaacgagacaatagtcactaaacccttcagatctattaaaaaaagcacacttaaacagaccaatcacaagacttcgtagaattaagggtattaataaaggaatacgttggcccacatagttttttgttcctaggcacttacaagctgcctgggagtcgcaggctggaggccacagaagcccaggtccccggcctccaggcacttacaatctaaggcagaagagacaccaggagttagaaaaataacgtgtctgaactacgactccaagaactaaattttttaaagcacaaggaaaagaacctcggcctggggaacaggaagcttcggtcccgagggggtttccctttcgctaggtatgtgacactgccaaagacccgcctccctgggcctcagtttccctgtcatacccccttgtccccgtggggccgcgctgtccgcggttcgcccgcccacgcacctggtgcagtaacacattagtgtcgggcagcaagtagtgcggttgcgggcagacgctgctcgccgggtcctggggctgcggctccagggccggcccctcgtgcgcccctccacacgctgcgcacccgggcgcaccgcagccgatgtcgtctcgcaggtagtgctcgcgcacgatcttcatcacgccgcccgcccgggtcttttttaagaacgtcttggacttgagcatcttgcctcgccgcgcagaatcctaaccccagcagcgctcttccagcaaaaggcgtcaatctagaatacgcctaaccccggaggttcttccctttccattcccggatattagtaacacttctcgcgggaaaatgccgagataaacattggttggctctctgacggccgcggggattgggcgagagtggggaggggcggcaaagcaaggcgaggagccatttccgcccgtggcctaggcggggcttccttctggacgccacctcacarcgtgtgttgctttccgctcctcggaacatccgggagagttgacttccggcggcttgtgggagtgctggttctgtcctccttgcgggtgcggagatggttgtcttggttacgggtcctaacggtcccctgccttgaaatcccttgttgagggcctgcaaccttgtgcttccgaccggagacgcctttggtccctcggtgtctgcactggctgctggtcaaggcttcagtgtggagtaattgacactttcgaggtaacttgcgactatcatcgctttctttcccgcgtggggcaaggaatcccccgagctgccaagtttggggcttaattttcacgccgagtgtataggcagtccccgtctcgggccctttgtaatcgaggagagaatttgtctttgaattcactttttcttacctatttcccttcaaaaagaaggagggaggccgatcttagtatagttctcgctgtttcccctccacacacctttccttatcattcagtttagaaaaactgaaatatttaatagcataatttgttatatcatgaggtattaaaacaaggtagttgctaacattcttatgagagagttagaagtaagttctatttagaatttcttgaatttttcttatatcctgttgttttcattctgctatctataaaaaatgtttttgtccccgttttccctatttaaaacatcttcaatgatgcctcattgcctgtagaataaaatccaaccctattttgacatttaaggccttccagtcttgatcgttaagggcgtgtgtgtgtgtgtgtgtgtgtgtgtgtgtttgtgtttgtgttgggggggcggtgaaaggagtaactattccaagacttggctttgtttttttacttccacttacgtatcattaataactgcatgatttctcctttttaccatgcctgtccaaatctttaaagattctaagtgctacctctgtgtaacgtttccctgaccaactcagacgtgatttctgttatctttgagcatgtgttggttttagtggtgccattcttgattataatgggcttttttcttcatcttgtacatttctttgtttcctccaagtaagattcctccccgcaggaactgtttttttaagtttctcgaaggctgacttcatattaggaattaatgtgtttgatttgagcattaacttaactgcaataatctgttctagatttgggatgcastaaattgcctaatatttatttaaggaatccttagtctctctttaatacagtccatgatttctgtagttaattttatagtacatttgaattaatgttttttaacctacagaatattaaaatcaaattagagaagaaaactgatccataataataaaaatgtctcgaaaaatttcaaaggagtcaaaaaaagtgaacatctctagttctctggaatctgaagatattagtttagaaacaacagttcctacggatgatatttcctcatcagaagagcgagagggcaaagtcagaatcaccaggcagctaattgaacgaaaagaactacttcataatattcagttactaaaaattgagctatcccagaaaactatgatgatcgacaatttgaaagtggattatcttacaaaggtaagatcaggtttaaattttgtgttctatatgctttattgtcttcaaacggcaggtaaataagaattaaatacacacattatctgaacttgaaatgatacatttatatttcttgwcaagtacagcctttaaataattttggtgttcatagaagtagagaatagaatggtggttaccaagggctggcrtggttaggggtgaaggagggttggggagatgttggtcaaaggatacataattacagttgaataggaggaatacattcaagagatctattggacagcatggtggctatagttaatgacattgtaatcttggaaaacattgtgtttttgaaaaacacagcagatgttaagtgttctcattactaaaataactatgtgaggtaaaacattttttaattagctagagttaaccatttcacaatgtacgtatacttcaaaacattatgttgtacatgacatatacacacagttttatctgtcagttgggatcacctgaggtcaggagtttgagaccaacctggccaacattgtgaaaccccagctctacttaaaaaaaaaaaaaaaaaaaaaattagccagccatgatggtgggtgcctgtaatcccagctgctcgggaggctgaggcaggagaattgcttgaacccaggaggcagagtttgcagtgagccacaatcgtgccactgcactccagcctgggcaacacagcaagactctcaaaaactagtaataataataataataataattggaggccaagtgcggtggctcacacctgtaattccagcactttggatgctgaggccagtggattgctccaagctcaggagttcgagactaccctgagcaacatggtgagaccacccttgctactaaaaaaataaaatagccccgcgtagtggtgctgcgcctgcaggcccagctacttccgaggctgaggcgggagaatcacttgaatccgggggcagacattgcagtgagctgagatcgtaccactgcactccagcctgggtaacagagtgagaccctatctcaaaaaaataataataataatttaagtattgaaatatggagtgatttaaacgtagatatggataaattacttttgtaggctcaatttaaaaaatctaacatatgaggtattttgttgttttttgttgttgttgttggagacagtcttgctctgtcacccaggctggagttcagtggcacaatcttggctcactgcaacctccacctcttgggttcaagcaattctcctgcctcagtctcccacgtagctgggattacaagtgctccccaccatgcccagctagctctctgggatcacttttataagggcaccaatcccaacagtgagggttctacccttataacctaatcaccccaaaggccccaacttcctgctactcacattggtgattaggtttcaatatacaaattttgaggggagaaaaaaaaataagcacacaagacgtattagccgttgttgttttcaactaacatagcatccttatctgtttcatccctttcattttctgtgccttttatggccatcggactgaatttgtttgttatttgtctgtgaatagactatgaggtccatgaggacggggatgtttttgtattcatggttgtatttccagcacttagaacggtgcctgacacaaattaagtgcccagctatttcttaaatgaatgactgaaccccattttgctctgattaaacaaagccactaggtggttaatagcatacccaaggccattcagatgaaagtgatagagccagataggattcaaacctaggaagtctaaagcctatactctacaaaagtgaagctccaaacactttcttttaggtaccctatacagtcacctacctagtctaggtcacttggtagtttatccatgcatccagtggtttcccatccctattcccttactctttttgcatttcacatgaactccatctaccttcacctctccagaccttagtgcaactcattgaagaaacctgaggttatctcccattcattaattcacccactcagtcaacaagtatttttttaagtgccacctgtataccatatccagacttacattttgttcagccacctcttgtattatttgttttcaacttgcattgtccttggttgtcaatggctttgcttctttttaggtgtaagctttatattatagaaatgttggttgattcatgacaggctctctagtgtaacaaatccaaattacagttctagatgcacacagtttgggttttgaattccagccttactaaattccttaatgtttttattccgtgatttcctataaaatgataatagtatttattccgtggaattatcgggaggattaatcaatgtatgtaagctcatagatgcttggtgtatactaataataaacttattatttacatattattttatttgtagctatacttactcagcacaatattattatttttctacttccatggtgcttagtgtagtttttgttgtggttttctagtttgactgaaaatgtagaagattgcaatagtcgtgttcctgagtttgacacataatcatcattgatccctgaaaggctgctgtttttctaatgtatttattcttttcattcctatagctcattccatttcttaatgcaaacattttaatgttttgtttacatgtattcttgagaatgtgtatcttttaactttacagaaatgtaaattatatgctttgttttagttctcatctcttttttcctactcagcactgtttttgaagttatctattactttgtatacatctagtcctttgcttccaactcttatrtaattctttgtgtgcgtctaccagtctttctactcctacattgctaggcatccagattgcctccagctccttgcaacacatgcagcattagacatttctcttctggacctctgtgagcatgtctttgacatatataaatgtctccttcatttaactaagtgtactgccaggttatctccaaaatagctgccctgctgtatattagtagagtttttttctctatcatacgagcactcaggattctctgcttgaagactctttaggaataagatgtttgctctcaaatatatgaagaaatacctattgtagagttagccttccataatttattgaacctaaagcacctctgttgtaagatgcatcattacatacattgctaaggttaaacacttccagttgaattgttaagtgccttagattgtaaaatgcattccaattttagagatgttaaaatgtgagaaagtgtgagtctggagttgatgaaagaatatttaaaaaatatttttattaaagaatatgtatatgtatgttaatgtgtgtatgtgtgtatatatatgtttacttcttacatgccctgggaataacaccttagacaggcaaacagcactacacacatgatatatattttttcacttatttgtttatgtataaattggtatgtgacatatttctttatatgttttaaaataacacctttatttgtatgtgttattatatgtttagttatgtctttatttttgtctttatgtgtgaagcactccagatgaacaaagtgctacactgtttcttgtgagcagtgattctaaagctagtacaccccactgaattttgtccctctggtcgattgtgaggactcagaagtatattggactcctggtgttagagctgtttgttttcttggtgtttcaatgaggtccagctctagaagaaagcaaagaaggttcatggggtattttgaaatgaacagggtccccaaaagcctgatggatctggtaacaccacgcggtatttgattcaaatctatctggtagcatcctctctgaatttttaagtgaagaagaaaggggctcaatttggtagtgctgccatatactttttttttcttttaatttttttgagacagagtctcactctgttgcccaggctggagtgcagtggcatgatctcagctcactacaaccttcacttcctgtgttcaagcgattcttgtgcctcagcctcccgagtagctgggactgtaggcccgtgccacaacgcccagctaagttttgtattttkggtagagatgggggtttcactatgttggccaggctggtctcgaactcctggcctcaagcaatccacccatttcagcctcccaaagtgcaggtgtgaagccactgcacccagccatgccatacactttttagcctgggcaggaaacttaaagcctaggtcttgaaagaaaggtatttttaattggtcattcattctccaaagcttattgagcatcgtatgctaacgttatgaaaaataaattttcctcactagactatagctccatgataatggttggaagtcacaggaaaggtagatttctgctcagtgtaagcctgttattgctattaacattgaaatggcctgatcttaagtttctgagcttcctgtcattggaagcatttaagtagtcctgaatagtcaactgttaataaatattataggtatttctattttggaaagagattgaaccaactgcccagggtttcaaggattaagttcagcagttaataccagagacttgaaaaatggtggtttctggtaacagagacctggaaaccatggcttaagcaagagaaggattttgtttctttggtataacaaaaatccaaaaataggtattttagtagacctcaagtgattactccttgatcgcattaggaacccaggctccttttaaccttagctattttcaacatatgcttttcacctgaaatcataagatagcttatctgcctccagtattgtgtacatgtaaaaggtggtaataaggagaaggatagtggaaaagggggcatgtgccaaatgagtcagtcctctttaaagagttcttccagaagttcaagccagtggcctcaattgactaacattgtatagcatgaccacccctacctacaagggatgggaagctaactggacatgttgttactaataaaaaccagagtatgtcagaaagaagggaaggtttgatgttgggaggcaagtaagttttttcttctacccatcaaaatctttttttagttagaaaatatttgaatctaacatgtcccactccattgtggcaccaatacaaatggttatggatacatggctttattatagtttgttactaggaatagtcttggccgtattgatttgaattctccatgtctaaaaacaggaacaagcaggtccaagaacactttaaaagcacttcccactcagctgcttgttaactgaaagaatgtagaaaagctactcagaagagtagctattcaggccaaacttcctgatagtagagcattgttagctttacacttttatttccatctattgctgcctagattcccttccttactgtacttctttattcctttcctcttctctgttcttgcctttcaaatttttagacagggtctcactctcttgcccaggctggagtgcagtggcttgatcacagctctctgcagcctcaaattactgggctcaagcaatcctctcatctcagcctcttgagcagctgagactacaggcgtgtaccaccacacccagctaatttttttaatttttttgtagaaacagggtctcactatgttgtccaggctagtctcaaactcctggcttcaagcaatcctcccaccttggccccccaaagtgctgggtttacagcctgagccacagaattgagctctttaaaatttttaaatgccccaaactctttttatttatctctcattagagatctgtgggttccttattacctgggaaatgaatacatttcccagcttgtccttgagttaagagactcaatttagaagttaattgaaattataaacattgaaaccctgaaaaaaatgttttttttttcctcgtgatacaggttgtttcttatctaaaatgcttgggaccagaaatatttcagatttttgattttttttttaatttgggaatatttgtgttagaccagttgagcatcccagatctgaaagtctgaaatccaaaagggtcaactgagcatttcctttgagtgtcatagtgactctcaaaaagtttcagacttcagagcattttgaatttcagattttagggtttgggatgctcaacatgtaacagtattcttgatttgggaaacagtaattataaggaatgtgtttattttacattttatattgatttatttattgagatgttgctggatatatgccaatggatatgacagaggtcccccttcttatggccaagacagaaaatattttatgctttgtaggccacctatgctctatcagatttttcttatgggctggatttagcccatcaccattttttaattcttgctttagactatgtagtcagaaaagctattggcaaagtttagcagttaagagttacatgtcctgatttctgtattcaaaatggcactaaaataatagactaagggcagacaagacagaaacagaagagttacattcctaagtttttggcttatttaactggggccatttataagaatggaaggctgggagaaaactgatctgggaggtaaaatatattaataagttcagttttgaaggtgtaacttatagattcctaaatgtaattgtcagttagagtttaggaggagtccatcacacacacacacacacacacacacacacacacttatagatagatcacacacacccttatagatagatcacacacacacatagdtagatagatagatagatagatagatagatagatagatagatagatagataaatcagcatataggtggcacctaaagccatgggattgtatggtatttcctagggagaacagagggctataaagtaagtcaaaggggtagtccagctgaggagcctagaaagcttaagagtatttagtgagttaagaaaactagagaagagtatcatggaagctaaaagagaatgaagtggttagctgtatcaagtcatgctgtcaaataagataaataggcagaaaaaaacaatgcacaggacattatggactttaacaagaatagtttcactggaatagtatggggcaaaaactatattgaagttttgctctgaagaccaacagagaaatggtgctatagcaaagagaatgatgtgatcaagggaccatttgcttgatgatagaatgattcagtagagaagagggacttgacgatgcaagaggagggatttacttgcatatgttatggattggctrtgaaattcatgtatttttktttgtttgtttgtttgtttgtttgtttgttttagatggagtctcactctgtcgcccaggctggagtgcagtggcatgatctcagctcactgcaacctccgcctcccgggttcacgcgattctcctgcctcagcctcccgagtagctgggactacaggcacatgccaccacacccggctaattttttgtatttttagtagagacagagttttactatgttagccagtatggtctccatctcctgaccttgtgatacacccgcctcatcctcccaaagtgctgggattacaggtgtgaatcaccacgccctgcctgaaattcatgtattttaaggggcaaacaggaatcgtcttggttaaagcaaagggaataaagaattttctaaatagactaagagcaaaatccaagtgcttgagaaagcacagcatacttgggggatggcaagcacttaatattggctgaaatggagtttccttttaagctaatgacaaaagtagttggctagatcaagaaataccactgtattatgccacagtgtttagaatttattctgaggacagtgaggatcctctgaagaatgtaaaactaggaaaataatttttttttttttgagacggagtctcgctctgtctcccaggctggagtacagtggtgcaatcttggcttactgcagcctccgccttccaggttcaagtgattctcctgcctcagcctcctgagtagctgtgactacaggcgcccgccaccatgcctggctaatttttgtattttttagtaaagatggagtttcaccatgctggccaggcttatcttgaactcccgacctcaagttgtctgcccgcctcggcctcccaaagtgctgggattacaggcgtgagccaccgcacccagctgaaaataaatttttgatagcattttttaaaggtaagatagaggaatataaatttggaggttggcaaaactggaggcaggaggccaggcgcggtggctcatgcctgtaatcccagcattttgggagggcaaggtggactgatcacttgaggtcaggagttcaagaacaccctgaccaacatggtgaaaccctgtctctactaaaaatacaaaaattaaccgggtgtggtggcacttggctgtaatcccagctactcaggaggctggggcagtagaatcacttgaacctggcaggaggaggtggcagtgagccaaggttgcgccactgcactctagcctgggcaacagcacttggccttccaaagtgctggaattataggcgtgagcccctgtgcctggtccctctatccatttttagcctgtttctttcaagtgtttttaaaatatgtttattatgaaactgaaagtttttctttatgacaaatcatataatttatctttttctctttacgaagattgaagaattggaggagaaacttaatgatgcacttcaccagaagcagctactaacattgagattagacaaccaattggcttttcaacagaaagatgccaggtaagaaaagtttttttttaaaaaaaaacaacatctatttagcaattaaaagtaattttattgcctgttcatgtttgtgactgtaagctaaaatagagaaattttaagtcagagakagcaataatttttacacctagaccacaaaaaaagtaggatacttgatatggtacataaaatacagaaagtcaaaattcaacattcattcaacaaacattggtcagtgtaaaccatrtatgataaaggaagctctctaaactgaccaccattaacctttcttcttttacgcaacatattgattgattctcatgacccattggactttcctggcctgaagtactttctattattcctgtgtactttctctagctcagttgtgggcttatcatgcttaaatatgcctatggcaattatacttatgtaacttaattaaaaataatacaaacaatgaaataaattctttggaacgattcaataaaaggaactaaaaaaattatgaaattaaatataagcaacacaagtttaaagattgagggcaaacatgaaatccatataagataccttcattggtttcttcctaaatgtcttttaggatctcatgccattgtaaagaaattgaacttggaaatcatacatgatgatttacacaaaatcaaatcatacctctgtattcaaaatatctggatcctatataaaaatgtgaatgtttagttctatgttttaattacaggtaaaagtgtaaaacaggtaaattttccctttttaagattttactacttaactgatattgtaaaaaattatcggacctttttatcagccactatcacactagattagtggacctcaaactttagcatgtatcaggaacagttgaagggcttgttaaagaagcctactggatcccaccctcagagtttctgacttgtgggggtggggtcctgagaatgtgcatttttactrggttcgcaggtgatgcagatgctgctggtccagaaacaatactttgagaaccactgcatttgataataggtcttctatgctaattctgtaagacatatatcagattgaatgatgctgctgagagggcagtcacgagtctattgtaataaaactcttgatagctgatggtcataaaaaatggttggattctgaatattttttggagggctgatggattcaatgtggggcttaagagaaaaaggggagtcaaggattacatcaaaagttttggcctgaacaaatgaaaaaatggaatttctgtcagctaagaagaaagaaatcatggtagcaaaggttttgtgagtaaaaagcctgagttcaatttgggacatgttaagttggagttttctagttagaaatccatgtggaggtatacgaaaagtctcgtgtagaggtacaaatctggggatcattaggctatagacagtattcaagtcatgagactagatgaattccccaaggagtgcgtacagacagaagaggaccaagtactccaacattaagacaaagcagaaaaggagactgagaaggaaccacrgtaaaatagaagaaaaatgaacagtatgatgtcttggaagccaggtgatgaaaatgtatcaaggaaagaaagtgacttgtgtcaagctctatcattagatcatggaggaaaagaactaagaattgatcatttgcaatttagatgtcattgagatttcattggagacagtaaaaatatgatcgccatgggtttaagaggaaaggatttggagacaataattatagacaacttttgagcaagcttgctccaaaggggtggctaacaaagggggaagtgcagtgaagtccagagttgtggttttgtttgttcatttgttgtaagattgaaataacagcatgtgtgtctgttaatgggattgatatagtagggaaggggaaaatcagtaatatgatttggctgtgtccccacccaaatctcatcttgaattatagctcccataattcctacatgtcatgggagggacctgatgggaggtaactgaatcatggaggtggtctttcccatgctgttctcatgatagtgaataagtctcacaagatctgatggttttataaatgggagttcccctgcacaagcactcttgtctgccaccatgtaagacatgcctttgcttctcttttgccttccgccatgattgtgaggcctcccctgccatgtggaagtctgagtccagtaaacctctttcctttataaattacccagtcttgggtatgtctttattagtagcatgagagcagactaataacatcagattgtcccttcctgatcagaatctttcagtaggcaactaacaataatgtctgctacatgtattctttgagaatgatgagtatgtgcagattactgttttcattacctcattggttgagtgaataccttatggtggttcagtgttaccatcttaaagagatatccttgaagtatcaggataaaagggaaatgaaaattactttaataagtagagtccttgatgtttaacattaaaccttaagcagaagaaatatataattttataatttgaatttctaaaattattctttaagaatatcaattctctgtttaataatttatatggttacacatttaataattagtatggaattgtcatttcatatttaactgattaatatgagtaaataagtatttagctggagtaagtaaataatactgtcaggtttctgatttcctaactttatgttgatataaataggaaactgtgagaaaattagatctcaaatacttttttaaagcctgccataaattctcttctaatgtagcaaatatcaagaattaatgaaacaagaaatggaaaccattttgttgagacagaaacaactagaagagacaaatcttcagctaagagaaaaagctggagatgttcgtcgaaacctgcgtgactttgagttgacagaagagcaatatrttaaattaaaagcttttcctgaagatcagctttctattcctgaatatgtatctgtaagtatcttatatctatttttaactatgacatatattttcagactaaaatttaccatttatatagtagcaattacttttgaagtacccaattgatacattattttatggctatggatggtgaatggtgttgagatccaaattttaaaggatcatgaccattgatctccaaagtcaagcaataaataggtttctgaagttaatgactgcatagtccatagaaatgaattatcgtaaactggtggtttcttacattctcaaaatgaaaaattataaacaacagagtagttgttgccaggggttggttggggatagtgggagagaggagtcagcgtggttataaagggataggatgagaaagaactttgtggtgagagattggcgcaagatcttgattgcagtgctggttacacaaatctagaacacctaggattaatctatggcagtggtctcaaatattttggtgtcagcattcatttacattctaaaagttattgaggaccccaatgagtgtttgtttatatgggctgtatctattaatatttaccatactagaattttaaactaacaacttttttaaacacaagaataagcacacaattccattggccttaagagtgataatgtcatatgtcatgtagccactggcaaactccactgaacagtcatgagagaatgagaatgaaacggggaaaaaaaatcttaataattactaggaaagtcgttttgatcttgtgaattccctgaaaggatctcagagtggcgagtggggcagagtccaggagtcccaaaaccatatgttgagaactgctgctttttaatatgtagatgtcattttaccctgagaggcttgaattttttaatccctaaaaagggttaatagtaacggtgcgtttctattggggataattgtaaagactataactatgtatgtaaaatgcttgtgagcatagtgcttagaagatagtaaacacataaaaatgttgtctattgtttttgctggagtggtggttgctattcttggttctcattgggaaaagatttgcagattagtgatgtctgataaaatgaagttacttttttgttcagctgttttttttttttttttaaaaggctcaaatacagcttttctgtccaaagtatactgtccaaaacaaattaaatatctcaaattctgtttttgaggcttcatttacagtagatataaagtatcacactggtggcagttacacatatttttgctgtttgttttcttaatattccttcttacatcttttgttttcacagacaatattatccttaactaattaattatatgcagattctttttgttgagggctagtattaagatttgcctcttaccaaataatggtattcttgtaataccgtcatatgttaaggagtttcagattgcatgcctatatgatagcccctaattactctctcctaatttgctgtgatgatttcttagttttatgggaccttgtcagatggaacactttactgagctagggtaggaaaatttctctgagacaagtatgagtggaaagagagacctgaactaaatggaagtaatgaygtgaaagatacctcttgattcattctgattagacttccactgtagggacagcagtaaataaagctttgccaagagcctgggatgaaaataaagaatacactttacctcttcatcaagtatttattgagtgcttatcatatatttaggcattggaaatacagcggtgtataaaccagacaaaaatccctgccctcaggttgtgaaagtggagcaacacaggcaataacttaaaaattaaatatgtagaatatctgtttgtcaaaggtgctacagagaaaagagcaggggtgaaaaatagggagtgctacttaaaattaggtaaagaaatcagggagggctttactaacaaggtaatatttggtcagagacctatagggagacaaggcatgagccatgcatttatatgggggaagaacttctctagcagaagaaacagcaagagcaagactcctgaacatttgtgatatgttccagaagtttacaagcacctagtgtggagtgagcagtagtagatgagtagtaatggagtgtcagtagaagggaggaaatactgtcaaaggtaagaggttataaatcatctggcccttgagggaagttaattgaacattaaggcttgatagaaagtattagtggctagggtccattaatgactgtcttgttgtagttttgtaaatatttatctttattactgrtaagtgagagcactacaaattacaaattttaattgtaatttggatttaagactgcttattaatttaatttttttcaaggttcgcttctatgagctagtgaatccattaagaaaggaaatctgtgaactacaagtgaaaaagaatatcctagcagaagaattaagtacaaacaaaaaccaactgaagcagctgacagaggtttgtatggttttgattgctggtgggaagaagcttcrgctttttctgtagagtccctcaggatttgtgataagrcatataaaagtcagtgattgaaaaatgggactatgggatggtgactgctacagttcaataatgggaaggaggttaaattggaagtagtcatcttaaacattgacaagacaagtctgtgttattgacgtatcctatagttgagcttttattgttgcaagtcaattttataatcaactgcttttgaaatcctaatatgggctatatctgaaaattgctgtgtatccttagatgacgcatatgcatgtatttatttagtaatttgtctctatttttaacatcactttgtcaggaaatttaagcaagaaacaagaaatgtaggccaagctatgcaggggatctcttgcaggtgccataagaaagaagaaaaggagaatatttttactttgaactaagttgactcgtaggttctggtttgcctaagactgttgccattattcctgtgaataaatattaatagcacccctttattttcaaaattatctcagcctagacgatgaatatagtaatcataaatcaacatttatatagaagggtggactaatcattaacttggttgtattattgaccagatatcctagaatactatcttgtagttatagtctactaacaaaaaaataatggtagattgattcattctaccatgtaacagttggaaatgggtggctgtttttcttcaaatatttcgttattctaaaaggaaaacacttctagtttacaaatgggggctgctgcagttcttcattacaagttagccttgttcgtgatatgagatggagctactgtccatttattacttacgtggcttctttgtgaagtgcagttaactctcataatatttattctgagcatgtgtactgatactagcattaaccccagtggtgtgcatggtgctgtgctaggtgctggcagtgaacccaagagaggcaatgcctgcccttctagagtttactttctagcaggttaggattagaacrttaggtgatattttgacactctcatttactgtgtgaccatgaccaggtcatttaatgtttcctgttctgtcaaatggagaaaataatactgtttgttcatttatttaattgcattgcctatatttctgtttcagagtaaaaacatgattttagcaaagttgcatacaaacatttatgtcctattttaagggcagtttttgtcaatgatattatccagaaataaataattataatttaatttgtatttttaatgctctactttgctgtactattagtcttagagataatttacttaagtcttgccatagaaccaatatttcagacaaaataagaaggcttagcttcctctcctctgaggagcagtgacatcagcaggagcaattagaggggcagatgtgcccccactccaaacttcagttgttttcttttcttctcctagcatgtcatattgtgcaggtaaactgttttgcacatttagaaagatagttcaattaaaaaaaaaattcaactgtagtcaaaatagtagagaacagagaaggccactgtttggccactttctaattttgcagccttgggcaaatcatttatactctattgtttctgtaaaatgcccaggatggttttggtggtacaggggttattggggaagaggcagttagacaaggtcttagcgttggttctatacaccttatggtacctcagcatccctcaaggacttcttactgtgtagtaggagggctggaggagctccctatccttgtttttatcaagccaccctttttaaaataaccttaatatttgggacttctcagcatgatttctcttgaacacagattcctcaggccattcttagagtttgtggtttttctgccctgtcaaggacctggtacaggtcaacttgccaaacactaggraaaaagtaaatatttttaaataaaaagcaaaaccaatatcattaaacagctttatttatttatttaaacagagccttgctcagtcgccccagctggagtgcagtggtgccatgtctgctcattgcaacctccacctcctgcgttcaagtgattctcgtgctttagcctccccagtagctgggcttacaggcatgcgctaccacacctggctaatttatgtatttttagtagagatagaatttcgccattttggccagactggtctggaactcctggcctcaagagatccacctgccttggcctcccaaagtgctgggattacaggcgtgagccactgcacctggccaaacaggatgtagtaaacaataaatagtactactcaatattcaaataaatgtcacatattctggagtttattttttgaaatggttcattaaattatttactgctatttatttgaggaattaaaagacatagtttctcatctctgcgacttgataacaatgtgatgatcttggataaaaaacagtctgtctcctatcttaacagcttctccgtccgtaaaatagggacgataacatgtaacacctaccacacgtggtcatattataaagaatgaaattcattcaataaatgtgtatcctgcatttactatatacggcatgcattattcttggtacttgggataccttgttaaacaaaacagtaatccctgccatcatggagtttatatttttaaaggatatctgtgagatgtatattgtattttaaaagggaaaacaatagcaaatcatgtagtgtgacaaaagttgataattgtaatagaaaaaagaaaaaaatagttcaagataaggtgaattgagtgctatatggagagcagggaagagagcattgtcagaattctgtaaggttggctagtaggtctcattaaacagcttagaagtttacaaagccttgaggaagtgagagagagaacaaggctgtcttccttgagacagctcagggaagagcttctaggtagcaagaacagccaatgcaaaggcaggggggtactttggtatttgtggaacagtgaggagggcaatatgactggtatgcttgaagggtggaggaggatagttgtagttaagatcagagaggtaatgagtctgttgaggtcatcatacagactttgattttaaccttaagtgaaatgaaaagttgcaggattttggaaagaggtctgacatgatctgacatgtacagttgactgttgaacaacatgggtttgaactgtgtaggtttatttacacatagattttttttttcagtagatatactggaaaattttttggaggtttgtgacactcgcagatgaactatgtagcctagaaatatagaaaaaatcaagaaaaagttatgtaatgaatgcataaaatatatgtaggtactatattttatcatttactaccataaaatgtacacaaatctattatcaaaagttaaaatttatcaaagcatgcatacacagaccttacatggtgctattttcagtagagagaaatgtaaacaaacgtaaagatgcagtattaaatcataactgcataaaattagctgtagtacatactttactactgtaataatttcttagcctcctcctggctattctggtaaactcaagtgtttgggatatctgcttaaaacgctgtatgatgctaatcatccccacatgagcagttctccagtaaaatgtgaatcacaataaaaagtgatttctcgcagttctggcatattatttttcatcatgtttagtgcagaactgtaagccttgaataacaccatgggaaccatatgaagtgtcaccagtgatgctggaagagctctcaagcagcagagaaaatttatgacattgtaagaaaaagttaatgggttgcctaccattttggacagaccattaattttgtaaacaaattatgtaaaacttagagcatccataatacagtacagttatgtaaatgtattttcttaggatttttaaaaaatgcttttctctagcttttattgtaagaatacagtatataatacatataacatacaaaatatgtactaatagactatgttatactaaggcttccagtcaacagtaggctatctgtagttaagttttcagtgagtcaaaagttacacatggattttttttttgactgtatgggagttggtaccccaacccctgtatcgtccaagggtcaagtctatttaaggtatcattctggctggtacatagtagaccgtcaacaaatgttttctttattgaatttctttttaatgagtattttaaaaccttcctgttgtcctggataatgttttttaaagaaagttctctcctgagaatagactgtagagctataaggatggaaacaaagagacttgttaagaggctgttgtaatctaggggagagattattgtgtttcagatctagatggtagcaggggaagtggtagattctggatttattttaaagtagagccaatagaamaaaggtagagtcatgaattggatggagkatgttaaagaaagataggagtcaaattaactctaaaaaatgttagtttgaataactgkaaggatagatttctgttcagctgagataggtaggttgtgaatgaggccgacttgagtgcaaaagagtgtggatcttagacatgttgagtttkagagatctgttagatgtacagtcaaaggtatgtggatatacaggtgtgaactttagaagataagcattcaagagtcatcagcataaagacgatatttaaagccaggatgagattaccaaaggagagtgagtgtagggaagagaaggaagaccacagcttgagctccagggcacttcaacattgaaatgtgggagagagaaggaggagttaccagtgaaatagggaaattaagagaattttatgtccaggaaatcaaagggcaaaagtttgtcaaggaaaagagagtgatcagctgtttcaaatgctgttgataggtacagttagatgaagactaagaattgacattgtatttaacaaggtcattgaaaaccttgtcaagagtagttctggaggagggatagggtcagcagtttgattacagtgtttgagagtgaatggaggaaataaactggacatagagtatagacaactctttctgagtaatactactgtatagaggaacaaagagagttggcaattacaggaaacatggagccagggaaggcttgttttttttttgtttttktgttttgttttttgttttttgtttttttccttaagagagatgacagctgttgtatttaaaatcacattgtaaccataaaaattttctcattgtcgacaacggtagaaggacattcatgtaattgttaaccaacagtgtaggtagtactgttggatacccagttatagttatgtttaaggctccccactttagtgctatccgtgtaataaaaagagtcatgtatatttggggtattgccaatagtatgtgtttctgtgattatgatatttggggaaactactagaacagaggggtgtttgttgattgaattactcctgattagttctgtgggactttcttaatatctaaatagtggtttaaagaataataatttagtaaagtgagataatttatctcttaatagctagagttttaattatgtcacaaaaagttgagtttcgatttaaaaaacaactgaagaatatatttataagtgagtaaggaagatagagaatgttatgaccactagaggagggtttacaaaaagatctgggttatttaaatgaggctgggggaggttgaagaggtgattggacactgtcaggttactgaggttcarttgtcatcagtgagaaccattgtctctagacttttaaaactaatcacaaacccctaatttatgaaagtgctaaatgaaattgtcagtttttcatttgaagttttctgttttttcttctgttacttggaatgttcttatctgagtgttttttgcccagtggtatttcatgtttctttcctcttcagtctgtgggctgcatatatatacttattgttggcctgaagcagacaataaaaacagagaaatgcccatcatatccaaaggaagtagcaagaaaatttcgacttttccaatggtgtcattaattttaagtttcttgacccaaaagagtaaattttcctcttaactatagtgggagaaaaaataatatattttcctcacccattgcaaggtttatggctgagactccaataataaaagagtaataagagaaaagcataacaaatttatgtataatttatatgtataatttaatataaattttatgtgacatgggaaccttcagaaatgaagactaaaagacccagggaaaatgtatttttgtggattgtcatgcataagtatgattggaagacaaaagtgtatgatctgatggtaatcaactgggagaatttagcaaggcttgtttgttcacattcttcttgggctgtctgtgacattccttcccattaggtatagggcaggacgcctgtcaccttaggggagaggggagggagaaagagagtggccttcctaggtttgatgacctgcttcaagggagaaagaggcaaggggaattttcatttatgtggcccacttcaagagagatgggttgggagaaggtcagggagacccccctgtttctgcagttttcttaatttccttcaggttaaaatactcagtatgccagggtgccatgtttcgaggtgtctgttctaagtcctaacagaggaattaatattttattttgtagtgaacaaattgaaaatatatccagtaaaagtgtgtacactgattctgttttcctaaatttgacaaataaaaggaagtgttactttgttcaataagtgttcaataagtaagatacactgccatagtaagtttcaggacaaggtccatgatatatagctgcaaccaccataaagttactaaattttttcttttttgagccagagtcacactcttgtcacctaggctgcagtgcagtggtacagtctcggctcactggaacctttgcctcccgggttcaagcgattctcctgcctcagcctcccaagtagctgggattacaggcacccaccaccacactcagctaatttttgtttgtttgttttttgagatggagtctcgctttgtcgcccaggctggcatgcagtggcacgatctcggytcactgcaagctccgccttctgggtttacgccattctcctgcctcaacctcccgagtagctgggactacaggcacacgccacgacgcctggctaattttttgtatttttagtagagacggggtttcaccatgttagccaggatggtctcgatctcctgacctcgtcatccgcccgccttgrcctcccaaagtgttgggattacaggtatgagccaccacacctggcctgaagttactaacttttaataagacatgatccaaatttttcatatgacattattcgaaagatcttcataaagtgattcaacaaatattttattcttcaactcatrcttatttaaggttggatattttaagataaacaacattagtcttattaatgactttatgtaattttaaagttggatacaatataagctttggggaaaaaaacatgactagatggtattcacccaagaattttaagggacttaaaggatgaacctgaaactgcagcacatgtataatattgctatcaaacagagcacttgaagtaggtgtaattgcttgaaagctggtaaattgcctgcctgagtctagaaactaaagacctccacacttaaaactgataaagcactcttttatgcttactgagcttgtgtaatgcatgaagattaggatcagtgaatacttaggcaagttaaatacttccccttatgggggaaggtcaacagagtggtacaaatggacaaattatatttcacatatatataaagagaaaatagagaacaaattatatagactttcaaaaagccattgacaggttttaaattctagcttttaaaaattggcaggcttttaaaaaattacagtgaataacataacattaaatttaagactttattttcatgtatacaattcagtaaagaatactcacattgtgcaacagatctctagtacttttgtatgttgcaacactgaaaactacccactagacactgattctccctctcccctcccccagtcattggtaaccattttttaactttgtttctatgattttgattagtttagattcgtcatatgagtagagtcctacagtatttgcccctttgtgattggtttcaattagcataatgccctcagggtttatccatgttgtagcatgtgacagaattttcttttttttttttattgtactttaagttctggggtacataggcacaacgtgcaggtagtgttacgtaggtatactcctgccatggtggtttgctgcacccatcaacccgtatctacattaggtatttcacctaatgctatccctcccctagtcccccaccccctgataggccccagtgtgtgatgttcctctccctggtccaagtgttctcattgttcacctcccacttatgagtgaaaacatgtggtgtttggttttctgtccttgtgatggtttgcggagaatgatggtttccagtttcatccatgtccctgcaaaggacattaactcttccttttttatggctgcatagtattccatggtgtatatgtgccacagtatctagtctatcattgatgggcatttgggttggttccaagtctttgctattgtgaacagtgccacaataaacatgtgtgcatgtttttatagtagcatgatttataatcctttgggtatatacccagtaatggaattgctgggtcagatggtatttctagttctagatccttgaggaatcaccacactgtcttccacaattgtctttcacagtcaggttgaactaatttacgcttttttttttttctattttaaggttacataatattccattgtgtgtatataccacatttgctttatccattcatctataaatagatacctgaattgcttctacctcttgggagaaatgggcagactttgtaagaagtgttatcatgaattctcaggaaattgttttctctttagtaggtgaaggataagagccaaaaaaaaaaaaggaataaaaagaactaaatgaaaaacaaaaatagaagtattcttcagatacaactgttaaatccaatcttattcattatttaacattttaatacatttattgggctgggcacagtggctctcgcctgtaatctcagcactttgagaggtcgaggtgggcagatcacctgatgtcaagagtttgagaccagcctggttaatatggcaaaactccgtctctattaaaaatacataaattagtcaggtgtggtggcaaacacatgtagtcccagctactcaggaggctgaggcaggagaatcgcttgaacctgagaggtggaggttgtagtgagccaagattgtgccactgcactccaacctgggcaacagagcaagagtttgtctcaaaaaaaaaatttaatacatttattgatgaggaagcacaaagtataatctcaagtttgtaracagtaaagtttttctgagcagtggaacaccaaactagtagggcagattggaggaaggtctcaaaaggtaagtggactgattataaatgaatgtgttttctttttaataactatcaatcagcttatattcccaaaattagcatgttcaaaattgatcacctgccccagagtgtaattttttgccattttattatagaaattttcaaacgtaacttgaatttcacaatgacaccagtatatttatcagtaaatttctgccattaacatttttattgtatttgtcttatcaaatacctctccatctatccatctgccagtcacatttaattttatgggaaaatgctgaacttttttttccatttgtcagtaatttcttccttttcattactgagtggtattacattgaatggctctagttatttaccatttaatgggcatttgagttatttccgattcagagactttacaaacaaagctctgagaacatttgagtatggttttttgtgtggacatgttttttctcttgagtaagtacttaagtgtggaattttttacttctagaatttcagtttggttatttattatagcttttatttctctatttgtttacttattatgaacatattttcctttacaccactgagaattgttaaaataggagctttaaaattcttgtctgctaattccaaacactgggtcaccttggagttgatctctgttgattgtcttttcttttagaaatgggtcacatgttcctctttcttcagatgtcaagtaacttaaaattgtttagaccatcgagtaagtgtagatgagaacattgtgagtattatgttgttgagactctgcattttatgtacctctaaacggtggtgatgttcttgttttagcaggaaattacttggttgtactcaaacagcatactctgtctattgggcaggtgttcaaatttcagttcaattttttttggtattattggggctgctcagagtctgtcctacacatatgttgtttagagggtagccagatacttaagcagaaattacccagagaattcagtttcccctctctggctatctctgaaatttcctcctcatttagagcagctgcagttcccataaataccaaagattttctcatgcaccttgatccatccaacctggcacagaatgggactggcctcaggctaagggctactaaacaaaaacaaaaaataccaggaaactcacctaaatgctgaaaatgatagcaataatgacaactccatagtggtttactaagagaaactaaggtatttgttaggcatatctctgagttttgagaccagcaattaagaaaacaaattttccattttacttaaaaagtttattctctacagagagttcatgaatctggagaaaataaaattactctcagtctttccgttttactttatggatctttcttatccaaaatggtcttaatttttttcaccacttgggggcagtatatgtcccttttttttttttttttttttttaattaaacctgttgggggctatttggaaaatgtgattatttttgagctagagacccaaagctttacatttagttaccttattttcatttatattcattatttcatataaaatgcctgcaatcaatcacatagtatctttttctagtaaaatttaatatatttagaacttggagaatggagtatcaaaacaaaaatttgtgttccataatatgtattcagagatgtctcagttattgcactaatttcataattatgcctaccagaaatattgagaatttttaattctgttaaaaccaaaaacattcagggttttaaattctgttaaagccacatgaaatcattaaagccacacaattacacagttaatttgactctgcttttgtttgtatgagattaaaactgtttaagaaatttaatagaaggtttttttttggtttttttttttttttttttggagatggagttttgctcttgcccaggctggagtgcaatggcatgattttggctcactgcaacctctgcctcctgggttcaagcaattctcctgcctcagcctcccgagtagccgggagtacaggcatgcgccaccatgcctggctaatttttgtatttttagtagagaggggtttcaccatgttgatcaggctggtctcgaactcctgacctcaagcgatctgcctgccctggcctctctaagtgctggaattacaggcatgagccactgcgcttggccagaatgtgattcttgacctttaaaaggaaattactctttctgaagtggcagttttagtggatttctgggatttccttttgtaattttttccagatctttagttatttgcaaataacatctagatactattataacactggaaaatagggctcatcttttacttcaagtccggagtttatttaaaagtgtcagtaatgtagtctaattctggcttattttgagttacattatgtatatgatcttgtgtatggtactttatgtttataaaagtgcttatagataactttatttcctatttatgaattttctctattagcaggtcaaaattttggttgatcacatgcaactcagctatatgttgctgttttgctattatagagttagttcagcatgctttttcatatcaaaaggatgtgatgttagagatacagtgtaaggcattagtgaatctgcacttaataaaactattaaatttcatgaggaaatggtgaaatatttttctcttatgagaactttggtaactaggaagcaagaagaattttgtcaagagtacttccttgtttagaaacatagttacattctttaaaaaattctgcaagattatcttgaggttcatcttaagtattcatatgtaagtaattcagttaattttatttgtatgaaaatgagttatttcattgatgaaacatatttgtttattaaagtttttatattttagggagtgttaactgttttctgagatttctttttatcttatccaagtgatgagcttaaagtttctttgtaaggtacatatttatgatgatacccatcagttataattatcctagaatgcttaacaaattagtaaacagtgatagatttgcctctttatattaaatttaaaatgtataagcattgcttaaaatttagattcatagccacctgcatgggttctattttggtctgaggtggaactaagaacctcaatttttttttttttttttgagacggagtctcgttctgttgcccaggctggagtgccttggcacaatataggcttactgcaagctccgccccccaggttcacaccattctcctgcctcagcctcccgagtagctgggactacaggtgcacgctgccactcccggctaattttttgtatatctttttagtagagacagggtttcactgtgttagccaggatggtcttgatctcctgacctcgtgatctgcccaccttggcttcccaaagtgctgggattataggcgtgagccaccgcacccagccagaacctcaatttttaataaacaacccaagattctaatgtggcgggttcatggacactgaccacaaatcattttttaagctatttttgttaacttataattaatttaaaaataactttgaatttttaattacatttcctgatttgaaatttatatattggctgggcaccatgactcactgctataataccagcactctgggagcccaatgtggatggatcacctgaggtcaggagttcaagacctgaacatcgggaaaccccatctctactaaaaatacaaaaatcagctgggtgtggtggtaggcacctgtaatcccagctacttgggaggctgaggcaggagaatcacttgaacccaggaggtggaggttgcagtgagcggagatcgcgccgttgctctctagcctgggtgacagaacaaaactccgtctcaaaaaaaaaaaaaaagagagagagaaatgtatatattaatgccatttcttgccgccaatataaagttaatatgttttaatatatttaacatattcaagaatataattgaagtcatacactattacgttacaacttggacttactaaaatccctctcttgcctatacctctaaaacctctaaaaaattgctccttcacaaacctgttaagtttttacaaataatacaaatggcttacgataaaagtgcatgagggaaaaaaaattcatgggaaagctaaaatgaatgcaattttaagtacgacataattgggaagaagtttcatttagctgattgttttatacatgctgtatgaagagacataatcttttaaagagtcataagacttttttttccctttgctactgtgtgtataatctttagtaaatctaggaacttgtaaattttaggggcaagttttgaggggcttattgggttttgagatgaaattttgaacccagtggccaaaaggatgtatcactacatgatggcacgggaaaactcaggagggaccttaccaaatacyttggtttaaatccagagataccatgataacttcgttctcttgatctgcatagtgtttctaagccagattccacagatatgttttggagtatctaagagttctttttgataatttttaactttatgatttaatttttttaatgacctcagaaattaacagatgcatatgatggttcatctgaatgaataatttataatagagtactatcactatgatgtcattgcccatgtttgcatttaattttgtcatggcattagcaccacagatcacagtttaaaaaaacagtagtcaactgtccaggcacagtggctcacggctgtaatcccagcactttgggaggccaaggcaggaggattgcttgagctcaggagttcgagaccaccctggccaacctggtgaaaccctgtctctaccaaaaatacaaaaactccagcctggccaacatggtgaaaccctatctctaccaaaaaatacaaaaattagctgggtgtggtggtgcaggcctgtagtcccagctactcgggaggctgagatgagagaattgcttgaacctgggagccagaggttgcggtgagccaagattgtgtccagcctggaagacagaatgagaccctgtctcaaaaaactacaaaaaaaaaaccccaaaacaaaaacttagccaggtgtcgtggcacacatctgtggtcccaggtaggaggattgcttgagcccggggtaggggtaggggagcagagtttgcagtgagccaagatcgcaccactgtattccagcctgtgtaagagtgagactccgcctcaaaaaaaagaaagaaaaaagaaaagaaagaaatagccatcaacttaatttgtaagataggtatttcagccaaataaaggccaggtgctatcatgcatcactgtatgaataaaagtttcacagttcaaatagagaaaaatgatgacaatatagagttgtcacactactgagcatagtcatgccaaactcaaagctaaatgaactcctacttattttactattttaaggttaaattatatagtcaacattaactactgaatagaataagcattgctgtttaggcttagttgaaaggaggaagtaaagggattctaggagatgaaaatgtgaatgcatgtcatttttcctttcttttccagttcaaagtatccctctctcagctgtcttctggcaggcagctggatctgagtggaagtcttgagctttgggaaagctagtgttccagttacgtattgctgcataacaaatcaccctaaaacttgctgtctcacaataatttattatttgtcacagctctgaaggttgataggttcagctgagtttttcttacctcactgaggctggggtcatctgaagtcttctttagtcaccagtttggagccaggatgatrtgaccaaaacattactcccttttgcacttggcctcttcatgtgattagtttaggcatccttcaacatggcagtctcacagcatggcagctggccacctccaaagcaaatattcaagaaactcaggcgaaacttaaagacttcttaggatgtaacttcaaaatcccagaaaattgcttctcccacatgcttttggttaagcagatcattaagaggaatggacccacttcttaatcagaaaatagcttcctgcatacaagggaagaaattgatagagaccgtcttggagataagctaccaaaatttgagatttctctcccctgacttgagtgaaagcctagaaatagtgtgagagaaccctgagcaagagcagaacagattgtcggcagagctcggcctataaaaatctatggattactcccttcactcctcaccccaaataaggtggataaagtctcctttgcctccactaggtgagggaatcgatgtacagtgttctgttaaaagaaagactcttattatgaccttcaaaccaagcccagctctatttgtttataggaaatatgcttaatgaaaattgataaagattgaaaaatgggccgggtgcagtggctcacgcctgtaatcccagcgctctaggaggctgaggcgggtggatcacctgaggtcagaagttcaagaccagcatggccaacatggtgaacctgtctctactaaaaatacaaaaattagccgggcatagtggcaggcatctgtaatcccagctactcaggaggctgaggcagtagaattgcttgaacccaggaggcggaggttgcagtgagccgagattgcgccattgcactccagcctaggtgacaaagcaagacttcgtctcaaaaaaaaaaaaaaaaagattgaaaaataattacttaaataatttttaagtaaaaaattatataataaattttaagtacagattatatagtttctattttttatcataatttagtgaaaccagagattaaagatgaggaggaataaacttacttggcaattagaaacgtatcttttggattaaagagcaaagaaaaactgaaataaaacaatgaaaatgagaacatttttatatcaaaattcttagacacatttaaagctatgccaaaggaaaatctgtagccggaaatgcctttattatttaaaaaaaaagatgaaaaataaatacatgtagtactcatcttgagaaagctggaaaaagatgagtagaaataaggtgtttggaattaactgacatgaagtaagggaaaatacatacagttctatggcagtaagcttgaaaacaaaaaggaaagtgaactgtgccaacaaaatatagattactaaaattgacagaagtgagaacttgatttagaacagttaccatagaggtattacaaaaataagtaaaagtgtacaactgataaaattaccaacaggttcacagatagattactgcaaatgggttcacagttgatttagaaaaagacagctagttccacttacttatactatacccactattgaaaaagaaagttctgagaaagagactacaaaagcaaaataaaacatttaggccaattttgcttattactacagatgtaaaaatttgaaataaaatgttaaatgaattttaccattgtatcaaaagaataatactttatgattaaacagagtatattccagcacagaaagaataatccattgcatcagcaaattcatggagaatagcttcatgaacacattaacgtatcagatgcaacagcaattagtgttgaacacttaagattttatcgctttcttcatatgagtttgttaccttgtgaatgaaatatgttcccccaccgttcatctctagcaagaaaagaaattgattcatttgaagaaaactataaaatcttggaacatggaagcatcrtaccttaagtaagacaagctcattaaaatagcaatttttatgattaacatattaatcaaatgtagttcagttatagtctcctttttttcctgataatttgcaggggttgttggagggaggaagtgtggtacaggactttatcctttccatcacctgtgttaatactttttaattgttattgatctatatttccagacaaggtctcagtctgtcattcaggctggagtgcagtggcatgatcacacctcactgcagccttgaagtcctaggcttaagccattctcccacatcagccgcttgagtagctgggagtacaggcatgcaccatcacactgttaatactgttaaggcttatctcarttattcaaaaggcatgagaatccatacttttcttgcattgataaatttgggggttaatatgtgatacttttaagataatttagcaacttggtctctttaacattaagattcaaatttgtttggttcaatcatatttgggtcaatgcctgttgagaagccagtatttcaaatttgttacagtagtttgctgaataaaatgttgggtataaaaattgcctcctaatacatcagtgtagcattttgcaatggtggggtctgctagacccattagctagtgggtgatgtcttaatactagtaatagagtgttatactacaataataaccacataaaaataaatgagccaatgaatcagttagtatacacactctgcagaagcatcaggtaagtccagaaaagttgacttgctagagcaaaaagtaggagagacagaatctgaacccatgtttgttattccartctagggtccaccacatgtgatgaaagttacctttcctcattcttgagttttgctgggcatagtggctcacgcctgtaatcccactttgggaggctataatcgcagcacttttggggctgaggcgggtggattscttgagtccaggagttcaagactgctctggacaccatggcaaaaccctttctctactaaaatacaaaaaactaactgagcatggtggcatgcctgtagacccagctacttgggaggctgaggtgggaggatcatctgaggtcgggaggttgaggctgcagtgagccaagattgcaccactgcactccagcctgggcaacagagtgagaccctgtctcaaaaaaaaaaaaaattactgagttatttttttctttaaaaaaaaaaaagccttaagtttttatttgaattcacatgtattcaaatagatataattgaaaatttagcatgtaatagaaattattaagatttttgttttaatgcatagcagactttaccacttcagattttgtctgtctttagaatcaattttttttttgaaaaatttcttgaagatcttaacaatgacaagagttgtctctggcagcaaaacagacttcattgtggcttataaagggacagcctatagcagtcaaagcttaattaggtttcttgttcttttcagtatttagttgcctggattagattattgataatgtgaaacttgtgggaattctgacaagtgaattcttagttttccagaatagctaaccaactatttcttaccattcactgaactgctgtccaatgtaaactgcttcagatttgaaccttaaggtaaatgtcattatattctatttccaatttccttagttgtcctccacacagacaggagttgttcatttattaaagatttattttgaaacataggttgctgcttttttctcagtttacatcatgggagagacaaaagacttaaatggagtttagaaattcattacatccatagtaattgccttttattgagaacagaaattgaggcttggctattattatcccatttactgtgatgtagaaattttctgttagtaagggctgatgactggaaattttatgtgtccatttctttatgtttgaaaagtttactttttttgcttcttttgttttagtctatttaatgtcctcttttgttcctcctcttccacagacattaattgcaaaccttctatataataggcagagtattagttactaggattacagaaaacttccttagagttttccttatgatgtgggagacaagtaatggctgcccacagcacatgtgatacattttctgacagataagaatcaggtgttgtgaaaaaataggataaactctaggttattgctggagcttagtcttcccacaaaggttgatgctaagctcaagacatggaaggatgcagaggagaatacaaaatagtcttttctactctctatagctttaacaatggttctacatagtcatggggtttattttgagggaagatgctatttttcctgtttccaatgctatggcttactctattttaattgctaacaataaatgcaggagatttttaaattcaaaatacgaaagtaataatttcgtttaaggggaaattgtccaattgaaaaattgtaaataaagtgctggtcgaatatgtgcattcttatactgcacttagacttgcttctgtttatacttgcatatggtgtttatatttaaaggraatttataaatatatacatatatatacactatgtatataacattaataatatactctgtatatttattcttccatggaactactctctgaatatcctaaaatactctgcatatttcagagtcagatgatctttacctttttagatctttgcagttgcactcacagaaaacactgcttctttggaactcatcatctggataccccaacttacagtattcttcatttgcagaccactgggacattcctctttgtttaatgaaagccttgctctagatttagtcttcctttccacttcagctgctacctaggttacttatgtgattaattcatctatagccttggccttgaattttattgatctcatctctagtgattgccttttctccattttaacactcagtcttatagcccacatttggttccttgccatccagaactgatttacttctgaagttmccaattcactttcatccactaaacatcttatttcctatattttttatgttttaccattgtctgctttcaacttgtctttaacagaatttccaatccatataatttgtttctttatcaatcctttcctaaatttattttcttcccttgccaccatgttatcagtcttaaacttttttttttttttttttttttgccagtatcatctaattcctctcccagctttctttttatcaaaccagactgaaaaactctcaactctttatttttctagctgagcactactggcaaaaatcacacaagcagtaacaarcactgtcagtttattgttatcagcctcaaatggacccacacaattggtcgtaattctattatttctagttctctcatttttcgcagagattacttaaggcaaccagccactcttcttacatctccagttttccacgtttcttgtcgcattcagcagatgacttggtatttcatttcacagagaaaatggaaatcttcagatgagaactcccacagtgtccttccaacaaatctactcacatctgcactcattctggtttgtttgttcttagtgtttataatggaaagagtctcgccctcaagggatgggaaaatcatatgcctctagaaaccaggtggataatataaatttgtgaagccgtagggtaagattaggctgtggcctgtagcaaattgataagagctatctaaattattcaagttgttaatactctgtatcagctggaaaaaagcctgccttgatgaacatggcctctgatctaagactaatctgcacatctaagctgtggatcccatctcctaaagcccttttcaggagtatatgcttcattcccctgagtatgcccccttttctccaacagtaattcatcttttgctgttgtttctcaccaatatttgaatattgtcaagcttgtttcattttttaaaaccttcattggccctgttttcttctctagctactatactttctccacttttactattaaactgtagaaagagttgccgactgatttggatttgacaaacttagattggagtcctcactctactacttacgagctctgagactttccaagcctcagtttttttcatctgtgaaactggggataatttttagatcccatcataagtgttaagtcgacaatgtatataaaatagccaaaaaagaggacatactgagtatttagatatatttgttttagtccctaacactctaccttctgcccctaccgctaaatactttaaaggctttttgttggttctcggtaatatttcttagtaccaatcagtagtgtttctcaatattattgactgcttcaaagcactgtcttccactgtttttcctgacacacacccctggtttacccattgtttctgcgaatactcctttgggttttttgggatccctgttttttgcccatcctttaatgtttatattccttgtatttatgttcctccaaattctgtcatggcgtttgcacagttattaagctgttaatttggctatgatctctttggaagccaaagcaaagaggaagcattataacaatattaatttatagttaatcagcatttactacgttagacatttttataagcactttacatgtattacttgatatatgcttcacaagaactctgaggtaggacaccagaatagagaggtaaactaacgtgcacagagtcttactgcaggaattcagttttagacagttgaattctggagcttgccttcctagccataacactatactctcttccaaaacagtgacatgattaatgatgtttagaaggataaagcattcttcagaagaactaaagattcttgtaggacttaggtccgaaatgatatatgtgatgatctttcgggaggtgatagcgtatcctcagctgtaatcccataataagtaccatagtaacattccattctcatggaaaacttcagcgtagaacaagaacataataccataccaaagcaaaacacactgaatgtagtttttccataattacttctctcaaatagccctttgatagaaatttggggactaaaataatcaaagttacatttagtagtttaaaaaggacaaaatcgtcttactcatctttgtatctgtagtgcctaatccgtgaccagtcacacagaaatgatccagtcagtatgtgtggagtgaatatgacctcatttagctggccagctacttaagcagtaatgacttaacacaggatgcatttaacatgccagcttctgaaggtggagttgatgattggttgcaagatttgatgagttcaaagaaggaaaataagtaggaatttagtcccgtctgcttcccctcccagcttcccatatttaatcatttcttttttagcttttatttaattcttattatatacctggcagtgtttaaagtggtggaggtccagcgttgagcaagacaaaatccccacccttaagatgtttacactctggtgagataaagagaaaactaatgtgatggtaatgatacagtgagatcagtgctctgaaggagacaagcatttagattatatgcaggtattcaggcagtgggaacaggttagaagcagcattagtgggttcagacaatttcagatctccattagggttggagggtgaagtgtgaatrttaggaatggtgagaaatggggcttgtaggaagcagcaccagattgtaaagaaccttgtgaccaactttaaggtttttacttccattgctcttcccatatcagcaatgcctttcttaacatgctactgacatggggagagtagagggaagaacaatgtaaagatgtgtttcgagggtcacacgattcctttttttctgagtaacacaattggaactgcatgtttaatctcttcattaattatttttcattgtagatactgatatccatatgacttttcatctctaaactgtaaaatcctcaagaacaggaagtgtgttttattcacttctgtatcttyagcatctgatagtaactcagtaaatgtttttaaaaagtcatttaacatttgtagtcattttatgttttagcctagtaactaaaacatagttgttgtgttatttatttgaaaaacagtttaagttttaaacaactgagtttacagaccactctgtgaacttaagattacttgcctttgaatagggaaaaattactaaatttaaaaattgaggaattttttttactgtttaattacaaggacaatcacagcttaacagaagacttcaatacagaatttgggcaactatgttaagtgtttagtctgaaatgtgttattattcctttggtttatagacatatgaggaagatcgaaaaaactactctgaagttcaaattagwtgtcaacgtttggccttagaattagcagacacaaaacagttaattcagcaaggtgactaccgtcaagagaactatgataaagtcaagaggtaagtagttaaaatggctgcagtagtagttctctatttttagggtgcatcaaagtcacctgagtttttaccaacaatcagttgttaattttacttttacctyattcttctttgcacaaatgcatgcagttttggcagtttgttgggtttatattgtatttttatattggttgtttttgttttatttagatgtcactgctgtcttaaaatgtaaacagagatagaaacccagtaaaatcacacgtgtgtaaatattttttcagtgttatttgatgattatttttatgtagtggaatcaatttaaatacttaacagttttccctgaagtttttttcagctgtttcttcctgacaaaagacacacactctttcaaaaaaaaaatgacactttctgaaaatatgtttcctaatatttgctacttatagcaaatacctttttttaactggaatattcttttctgttgtttgttcagtaatttaatgagctgctacttagctgtatgtccctcagtacatctcttttcattctgagcctaagtttcatcatttatgagatgttgctaatacggataactgcactatataaactaagatcaaataaatatgaaagcctttaaatatatatgtactgcatatgtaatataaatggaatgaccttatcttaattgttcactccacttgaaataattcttaaaatgtagtagtcagtgaatatttgttaaatgaatgaatgatttaaattgtgtaatttaaattacaaattgcataataccgtatgtgaatttgcaaagatttgtggatagaagattgtcatttctactcccattatgactgacacatggtatttcttatgtatatggcattatgccaaaatatgataattattggagctttaaatccatgagagctgtgctcagtgggctctggaataaagctggagttcaaaagaagcatttaaaaatgaagtagagggcatagtggcacatgcctttagtcccagctacttgggaggttgaggtgggaggactgcttaagcccaggaattcgaggctgcagtgaactatgatcatgccactgcactccagcctggtggcagagtgaaacttcatctcttaaaaatataaaataaaaaagaataaaaatgaaatagattatgatgctaagatgataccagttggtattttcatgtcccctctgccactatcagtctatagcaatgacagatacaatataaaaagagaaaactaaaaagcacagtcatcagaataatccatcggggccacggatgatcattgaaacaagatgagtcatgagttgataattactgaatttgggtgatgggagcatgggtgttcattatatcacctctatttttacatatgttttcatttactataataaaaacctaggaaagaaaaatataacgttgatcaaaaagcatgataagcatctttatggtagaaatggaatagtaaaacaagaaaggactcaaactatgaccctttttagttcactcagcagaatgaatgagtttaaaaacatcggtcataaaatataagataaactggggaagaaaaaaaagcccttttatgccccgggtaaattctcacaaatgtacaaaaggaaacaggtgtatggatgttaattgtgtcattattaaaagaaattcaaatgcttttcagtagcagaatggaaaataaattgagatttactctgcaatataattttatgtagcagttaaaatcattaaattagatctgaatgtatcacttttttttactaaaagttccttattttctggcataacataatgttcctagttttggttttcgtttgttggttttgtaatttcattgcctcagctctttgtctaagaagtcttgatctcttagtggggaatgctatttagaaatttaggatttgggtgctgtggtcatggctacattggtcattatttctaggccctttgagtaggcagagaaagtagagggagaatgaggaggaggcttaacacactatggatgagatcatactgatacttcttttttttgagacagagtctcactttgtcacccaggctggagtgcaatggcacgatctcggctcactgcaacctctgcctcccaggttcaaacaattctcctgcctcagcctcccaagtagctgggactacaggtgtgcgccaccatgcccagctaattttttttttttttttttaagtagagacatggttccatggttgaccagactggccttgaactcctgacctcaggtgatctgcccaccttggcctcccaaagtgctgagatgacaggtgtgagcctctgcacccagcccacgttgatacttctaattccaattcaacactgcaacagccacttggatgaggtgccaactggctaaatatagcaaacttgaatatcacaataaatattggcaataatgaattacagtccattgaatagaataagagtttataagtgcaggctaataataaatacagaaagaggatcttaaaatttttttaatacatcatctttaccatttttaagtgtacagttcagtggtaataaatatatcctttttgggaaagaggatctttatggttgaaatccaagcaataaatgtatatgcatgtaagaatgaccattttgtagccgcataataatattgattcagaatcatcattggaatataaaaccatgaagtataagtatgttagggaataggatatttacacaaagcatctcttcacaattacttactaattttaaagggcaaaaggatacctttatagttaaactctggcagatgctaccttaacctggtgatcaaagttactatcaccaataatgggataaactgacgtcacatacctcagtacatcttcacataacatactgagaatgcgtttctgtatcagagaatcatttctgagaatcatttctgtagtattcctgcccaagtgcctaacctgaatctaataatgaagaaacttcagacaagtgaaaattgaggagcattctatgatgcagctagcctctgctctataaaaagtcataaaacacaaggaaaactaagaaatcttcaaggttaaaggagactaaaaccccatgacatctagatgcatggtaatagattataatatgatgataatagatccttggattaccattatggtaatagagccttggctcagggaaaaaaaaattcacaaagggtgttttgggagacagttgacaaaatttgaaaatggattgtatgttagataatattatattagggctaagtctcctgaatatgataattatactgtgattatataagagactatctttaatcttagtaaattcacactaattatttagggataaagggacctaatgtctcagttgaggaaacaaatgcacatgtatgagtatgtgtgtgtaggtgtgtatacacatatagatacatgacccttgaccaacatggggtccacttatattcaggtttttatcaacctaacaccaatcgaaaatacaattttcacgggatgtgaaacctgagtatacagaggactgactgtttggtgggatctgcaacaactgcaggacttcagcatgtacagatttgcatattcaggttgtgggggtgggtctggaacccattctccacatataccgttaagacacctgcatatattcacatatattaacaagagagagggtttgaataaatatgacaaagtaatatttatttaatattacaaaacaaatacaacagtgttaatgattggtaagtaaaagcattaaaaagaaccaagctggttacagcgtgtcatgtctgtaatcctagtgctttcagaagcacaggcaggaggatcacttgagcccaggactttaagactagccagggcaatatagcaagaccgtctttacaaaaaaaaaaaaaaaattaaattaggcacatggtggcatgcacctgtagtcctaactctctggcaggctgaggctggaggatcacttgagtgcagtagttcaagtccagtctgggtgacatagcaagacccccatctcataaaaaaaaaaaaaaatttaaaaaaaagattttttaaaaaattgcatgtgaaagcacaaaataaaatttaaaaatttttttaattaaaaataatctaaacattctaaaaataaaaaagcacaaaatacgtatagtaatatgtatcagaatagtaatactgatagtcatctttacttattgggtttgtaggtgattgttattttgtgctttgctcagtttttcttcaataaacataatattttgttaactagaagaaaaaaggctttctaaacgtttttgaaaaactgatgcaaaggaaaacaattcctaacagccctctctgtggaaataccaggtgggtcagtgaaataaagtgcaaaggcactgcttctgactgcagggaagtagttaagagttagtaaatctgtttctctgctcattttaaaaaatgtgtgttgtaggttttagtccaattcttggtataacttttttggggaacttgtcttaaaatggaaattaaaatctgggtaatcataaacaatttgtgaatgaaatagtcacaagaatgcctgcctacgtatctactatgcaatctaaatgataagttgtatttttttttttaccttaactgaactgaaagcctagagccatgtatacattctttaaaagttttaacctcaagataagattgaagatgactaatgaaaaaataccaaatgtatgttagtaagttttattatttactgtactggcttatgtagtttgtatattccttaaaggtaataaattgatatgtatgtatttgaacaaggtctgaaacagagtcccttctaaatctgaaaagtaggtactttatagttcatggaattacactgaagccccattgctagtgtctctattcagcgtcctaatacatagtcaacccttttaaagtgtacgctgtacaaggggatgtaaaatttacatgtctctttgaattttattttaacagtgaacgtgatgcacttgaacaggaagtaattgagcttaggagaaaacatgaaatacttgaagcctctcacatgattcaaacaaaagaacraagtgaattatcaaaagaggtaagcttataattagagtcacttatattatatagcatagtattagtgaaaaaaatagcccagagtagatttgaaggagagacattttttttgttatgtagttcctcccaaaaagataaattttttttttttttttttttttttgagacaggagtctttccctgttgaccaggctatagtgcagtggtgcgatcttggctcactgcaacttccgcctcccaggttcaaacgattctcctgcctcagcctcctgaatagctgggattacaggcgtgtgccaccatgccctactaatttttacatttttagtagaaacagggtttcaccatgttggccaggctggtcgcaaactcctgacctcaaatgatccacctgccttggcctcccaaagtgctgggattacaggtgtgagcaaccatgcccagccccaaaaagagacttttagtagctatttttagattttaaaaaagttgcatgctaagaattagccctttttaaaaggaaaattttcatgtggtgaatgaaaacatgaaggaaagaaattaatacagtcaagcttgaaaagtaagatggcatcactgtggatactttttgtttctacatgtatgtaggtagtcaccttagagcaaactgttactttactgcaaaaggataaagaatatcttaatcgccaaaacatggagcttagtgttcgctgtgctcatgaagaggatcgccttgaaagacttcaagctcaactggaagaaagcaaaaaggctagagaagagatgtatgaaaaatatgtagcatccaggcaagatttgcattatttcccaygtaaatagataccaattaacagattttctttgagggaactcttggctttggggaagatttagtgatttttttaaggtctattctatatgataatactaagataataccttattttattttattttatyttattttattttattttttgattttgacatttctgctttctgtttgcatacatttaagtggtgtaattttcccatgtgcctttattttaaaactttgtcatttggttttaggtacgtttcttgaatacagtaatgagctgatgtatccattaggataatttgggttgcaaataatgcagaagggtttaaaaaatgaagtgagatatgtttgcttttttttttytttttttataaattatactttacattctggggtacatgtgcagaatatgcagttttgttacataggtatacacatgccatggtggtttgctgcacccatcaacccgtcacctacattagatatttctcctaatgttatccctcccctagccccccactccccgacaggcgccggtgtgtgatgttcccctccctgtgtccacgtgttctcattgttcaactcccgcttatgagtgagaacatacggtgtttggttttctgttcttgtgatagtttgctgagaatgatggtttccagcttcatccatgtccctgcaaaggacatgaactcatcctttttaatggctgcatagcatatatattccatggtacatatgtgccacattttctctatccagtctgttattgaaggacatttgggtcggttccaagtctttgctattgtgaacagtgctgcagtaaacatacgtgtgcatgtgtcttttatgttagaatgatttataatcctttggatatatacccagtaatgggattgctgggtcaaatggtatttctagttctagatccttgaggaattgccacactgtcttccacaatggttgaactaatttacactcccaccaacactgtaaaagcattcctatttctccacatcctctccagcttgttgtttcctgactttttaatgattgccagtctaactggcgtgagatggtatctcattgtggttttgatttgcatttctttaatgaccagtgatgatgagcatttgttcatatatctgttggctgcataaatgtcttcttttgagaagtgtctatatcctttgcccactttttgatggggttgtttggttttttcttgtaaatttgtttaagttctttgtagattctggatattagccctttgtcagatggatagattgcaaaaattttctcctgttctggagtttgcctatccaccctaatgatagtttcttttgctgtgcagaagctctttagtttaattagattccatttgtcaattttggcttttgctgccattgcttttggtgttttagacatgaagtctttgcccatgcctacatcctgaatgatattgcccaggttttcttgtaggatttttatgatcctaggtcttacatttaagtctttgattcatcttgagttgatttttgtataaggtataaggaaggggtccagtttcagttttctgcatatggctacctagttttccaaacaacatttattaaatagggaatcttttccccattgcttgtttgtgtcaggtttgtcaaagatcagatggttgtagatgtgtggtgttatttctgaggcctctgttctgttccattggtctatgtatctgttttggtaccagtactgtgctgtttttattactgtagccttgtagtatagtttgaagtcaggtagcatgatgcctccagctttcttcttcttgcccagaattgtcttggctatgtgggctcttttttggttccatatgaagtttaaagtagttttttccaattccgtgaagaaggtcagtggtagcttgatgggggtagcattgaatgtataaattactttgggcagtatggccattttcacgatattgaatcttcctatccgtgagcatggaatgtttttccatttgtttatgtcctcgcttatttctttgagcagtggtttgtagttctccttgaagaggtccttcacatcccttgtaagttatattcctagatattttattctcttagtagcagttgtgaatgggagttcactcatgatttggctctttgtctgtcattggtgtgcaggaatgcttgtgatttttgcacatcaattttgtatcctgagactttgctgaagttgcttatcagcttaaggagattttgggctgagacaatggggttttctaaatatacaatcatgtcatcaacgaactgagacaatttgactttctctcttcctagttgaatactctttatttctttctctttcctgattgccctggccagaacttccaataccatgttgaataggaggggtgagagagggcatccttgtcttgtgccagttttcaaagggaacgcttccagtttttgcctgtttagtatgatattggctgtgggtttgtcataactagctcttattattttgagatacgttccatcaatacccagtttattgagagtttttagcatgaaggggtgttgaattttgtcaaaggccttttcttcatctattgagataatcgtggtttttgtgattggttctgtttatgtgatggattacgtttattgatttgtatgtgttgaaccagccttgcctccctggtatgaagccaacttgatcatggtggataagctttttcatgtgctgctggatttggtttgccagtattttattgaggatttttacattgatgttcatcagggatattggcctgaaattttgtttttttgttgtgtgtctgccaggttttggtattaggatgatgctggcctcataaaatgagttagggaggacctctttttctgttgtttggaatagtttcagaaggaatggtaccagctcctctttgtacctctggtagaattcagctgggaatccatctcatcctggatttttttttggttggtaggctattactgcctcaatttcagaacttgttattggtttattcagggattcgacttcttcctggtttagacttgggagggtgtatgtccaggaatttatccatttcttttagattttctagcttatttgcatagaggtgtttatagtattctctgatggtagtttttatttctgtgggatcgttggtgagctcccctttatcattttttattgtgtctgtttggttcttcctctcttctttattagtctggctagcagtctatctattttgttgatctttacaaaaaaaaacagctcctggattcattgattttttgaagggttttttgtgtttctgtctccttcagttctgctctgatcttaattatttcttgtcttctgctagattttgaatttgtttgctgttgcttctctagttcttttaattttgatgttagggtgtcagttttagatctttcctgacttctcttgtgggcatttagtgctataaatttccctctacacactgctttaaatgtggcccagagattctggtatgttgtgtcttcattctcattggtttcaaagaacatctttatttctgccttcatttygttgtttacccagtagtcattcaggagcaggttgttcattttccatgtagttgtacgcttctgagtgagtttattartcctgagttctagtttgattgcactgtgttctgagagacagtttgttatgatttctgttcttttgcatttgctgaggggtgttttacttcctattatgtggtcagttttagagtgagtgtgatgaggtgctgttgatttgggtggagagttctgtaatgtctattaggtctgcttggtccagatctgagttcaagtcctgaatatccttgttaattttctgtctcattgatctatctaatattgacagcggggtgttaaagtttcccaccattattgtatgagagtctaagtctgtttgtaggtctctaagaacttcctttatgaatctgggtgttcctgtaatgggtgcatatatatttaggatagttagctcttcctgccgcattgatccctttactattatgtaatgccctttattctcctttgatctttgttggtttaaagtctgttttatcagagattagaattgcaattccggccttttttttttttttttttttttttttttttgctttccatttggttggtaaatattcctccatccctttattttgagcctatatgtgtctttgcaaatgagatgtgtctcctgaatacagcacactcatgggtcttgactcttcatccaatttgccagtctgtcttttaattggggcatttagcctgtttacatttaaggttaatattgttatgtgtgaatttgatccggtcattatgatgctagctggttgtattgcccgttagttgatgcagtttcttcatagtgtcgatggtctttacaatttggttatgtttttgcagtggctggtaccagttgttccttcccatgtttagtgcttccttcaggagctcttttagggcaggcctgttggtgacaaaatctctcaggatttgcttgtctgtaaaggattttatttctcctttgcttacaaagcttagtttggctggatatgaaattctgggttgaaaattcttttctttaagaatgttgaatattggcccccactctttctgccttgtagggtttctgcagagagatccgctgttagtctgatgggcgtccttccctttgtgcataacctgacctttttctctggctgcccttaagattttttccttcatttcaaccttggcgaatctgacaattatgtgtgttagtgttgctcttctcaacaagtatctttgtcgtgttctctgtatttcctagatttgaatgttggcctgtcttgctaggttggggaagttctcctggataatatcctgaagtgttttccaacttggttccattctccccatcactttcaggtacaccaatcaaacgtagtttttgtcttttcacgtagtcccgtatttcttggaggctttattcattcctttttattcttttgtctctaatcttgtcttctctccttatttcattaagttgatcttcagtcattgttatcttttcttccacttgatcgatttggcttttgaaacttgtgtatgcttcttgaagttctcatgctgtgtttttcagctccatcaggttatttatattcttctctacactggttattctagttagcaatttgtctaaccttttttcaaggttcttagcttccttgcattgggttagaacatgctcctttagcttggaggagtttgttattacccaccttctgaagcctacttctgtcaattcatgaaactcattcacygtccagttttgttctcttgttggcgaggagttgtgatcctttggaggaaaagaggcgttctgagttttggaactttcagcctttttgcactggtgtctcctcatctttgtggatttatctacctttggtctttgatgttggtgaccttcagatggggtctttgagtggacgtgctattcctttgtgtttgttaattttccatctgacaggcccctttgctgctggcctgctggagtttgctggaggtcccctcccgaccctgtttgcctggatatcaccagcggaggctgcagaacagcaaagattgctgcctgatctttgctctggaagcttcttcccagaggggcacctgccagatgccaaccagagctctcctgtatgaggtgtctgtcggtccctactgggaggtgtctcccagtcaggatacacgggggtcagggacccacttgaggaggcagtctgacccttagcagagttcaaacgctgtgctgggagacccactgctctcttcagagctgttaggcagggacgtttaagtctgctgaagctgcacccacaggcacccctttccccaggtgctctgtcccagggagataggagttttatctatcaattttattttcttacacaatattactttctagttggtttttaaaaagacactgtggtttttttcagcaatatcaaaagcctatttcttttagatagatagatatatgctatgacagttttttcatttgtggcataattttttaaattcctatgactaatatctctatagaagtatttttttaaagaaagtatgaaagtatctctatagaagtatattttggaagaaaatctcagtatgctaacgatttcctgtgtgaaatgtaaaagaattatgaggagatggtatcgcattgtgttttaacttatatgcccttcaatcagactccctatgttttggtcctgccttctttcttctactggatgtgtagaagttactgaagtaccttaatatcaatcgcttttataacccttgaattatatcgacataccaaaacaaacatgctgggtgcagtggctcacacctgtaatcccagcattttgggaggccaaggcaggaggattgcttgaggccagaagtttgagaccagcctgggcaacatcgaaaaccctgtctctataaaaaaaagtttttaaattagcaaggcacaatgtcaagcacatgtagtcctgcctactcaggaggctggggcaggaagatggcttgagcccaggagttcggggttacgtgattgtgccactgtacttcatcctgggtgagagagcaaggcattatctctttaagaaaaaaagaaaaaaatactaaaacaaaacaaattttaccttaaaggtaaaggtaaaggtaaattttactcttaaagagttcacacattcataatttttcctagcctgtagtagtttttcataccctatataatacttcgacttggctaaaagatcacggtgtggctgtggttgtcatgcttggaagcaaaggattcatagactccgagtcatttcatttttatatttttgttaatattattcatctctcaacatcatcctaccacattattatttttaaatgaaggacattctcaattttgaagcctcaaccatatgcattaaaactactagaaaagtgttttggaagatgaataattatcccacatgaattactaagattttatatagtaattaagtcttttggaaaataatgtttaacaggttgaaatcttagatcatactagttaggaacagtatttttaggaattataaaactttatactattaatagttaagtttttcaggtaacacagtttatagagcatacttgataaaaggtattaaaatcttacgtacagtgcaaaagcctatttgtttcaaaagaaaatttatggttgttccttttcactccttgcagagaccattataaaacagaatatgaaaataaactacatgatgaactagaacaaatcagattgaaaaccaaccaagaaattgatcaacttcgaaatgcctctagggaaatgtatgaacgagaaaacaggtaaaaaaaaaaaaatgcttgtatggtattttatttatctttggaggttttagaagctttattgaaattaaatgctatttattatataatgtcttttttaatacattagagaaaasttgtcataaatygaaatctaagtataatgagaacatgaaagttctaaagtcttagaacaagatttactagactttaacctttttgctctgttattcctgttatgtctttttttttaccctagtgacttctctttttgcatttgcttcagttcagattgaggacagataaaaagtaaagagtgctgagatatcagttcttcctgtattatagcaacgatttctcctggaaacttgttaaaactagaatagtaatttcaaatatacatatgcctcatttagctgctggctccgaaagatgtcgtattaggtaatcctgaagaaatatcatttttggctgggcgtggtggctcacgcctgtaatcccagcactttgggaggccgaggtgggcagatcacgaggtcaggagatcgagactatcctggctaacatggtgaaaccccatctctactaaaaatacaaaaaattagccaggcatggtggcgggcgcctgtaatcccagctactcgggaggctgaggcaggagaatggcatgaaccggggacacagagcttgcagtgagccgagatcgcaccactacactccagccttggcgaaagtgcgagacaccatctcaaaaaaaaaaaagaaaaaagaaatatcatttttattcatgcagttacttttagatcagtaaatattaggctcacctagttagtgattggcagaattcagggaaaataaatactatttatttcaatggcagatatttttataccgttattatagtcagtgtggtttttgaaagtttatattttaatgagaaaattattttgaaattgacttgtgatactagtttatcagcactgatttgcttatatgatattttgattgttgtcagcaaggctttaaatcagacttaatctataatagcattgtaccatgtcatttctactaggaatatagtagcagaaaatttggtatgtccacccctcaattccaggaaaaaaaagctgctgtattatagttgcttatttataagttgctgtatttataagttagccactgctataaaaactatatatgtagaattatcctttggtagtaaattaacaaagatatttttaaattactgttaaattgttatttaatatagcaggttggtagagatttttatgctaatgcctctgaggggtatgattttattctcaggtttctttgttcttgggtaaaaatatttgtggtaataagagagtagatatacaatttatgatagaacttttttaggatttttgctaaatatgacttagtagaaagtcataaaatgactctcatgaaaatcagattattattttcctcataaatttggcttgcatagatctttatctacctgtttgatcttttttgaaagtctgcattagaagtatacgccaaaggaaattaatatgaacttcaaacactgaacacaaaagaaatcattcatttgtgtattcaacagatactttgtgattatactcttctgcctattttttcttgttcttctcttatttgagctttaaaataattatgtcatatttataatctagtattatattttcaatgaaaatggcaaagaatttcaaaatataaaaattctaagtgatcattcagtactatcttagcagtagacaaactaaaaatatgctttaggcaccagcaaatacgtgtgcatgccagaagaaattatacgtattcttaaaaaatgttttgacatattaatttttaaaataacattttttatcttgggaaaaataaaaacacctctgcatttgtttacacttagtttatattttaatatttgagtatcgaattactagtaggagcaccataatcttttatgtgaataaggcttttgaagtcctaagctagccttcatatgttgaatcctgagaaaattttgttccaagtagctcaaagaaatattggaccactctttaaatagcattattttttattttaattactatgttatgattgttctcttttttgaccatatatgtttgcatgtatgtgtataaaataacagatgttaagagaaaatttcctagttttcattaaataaataattataaagaagtagaataatgcagcactacagaaatgtccttgagactctttctgcttaactcctgtcttccataactgctattctgttatgctaataacttccttgcttctccttagacttttattatctatgtttccagtatataaacatctctgcacaatatagtttagtttttcatattatattagtatcatataaatggaattatgctgtatacacatatatttttgtggcttcttcacataaccttatgattttaagattcatttgcttttgcacttagttgtcccttcatgttcattacaaaagtataacagttttatgaatgtacatgcttagggcagcagagttattaagagattggagagagaattccaaagacattctctatctttggcaaaattttacttcgtcccagccctacattagaaaggaggatcctgtaccttgtgattacttgctctgaaagttcaaaatgcagactaaaagaagaggtatacacctattaaatgctaagctttatgttggaaagttttacatttgcaccctcatgtaattttcagagcaataaattaatgaatttagcaaatatttattgaaatgtaccatttgccagctaaatgctagacatcataggtagtggtgacctttgtcttcacaaagctggtagtctaatggagggtaaagacaaatagagaaacaattatcataagtatgatgatgatggacaaaatgataggataaaagatgagaccacctgtgtatctaacctagccttgggaggaattggggaagacttcataaatgaagaactgccccttttgactaaaactactattaaaagtaaaacttcagacacattaaatttaaagtttaattgagcaatgaacaattcgcaaatcaggcagcttccagaatcacagcagattcagagagactccaggggtccctcatggtcagaacaaatttatagacaaaaaaagtaaagtggcatacagaaatcagaagtgagatacagaaacagctggatttgttataggttggtgtttaacttatttgaacactcagcagtgtatgaatggttgaagtatggctgctggggttggcccagactcagctgttgttacaggcacatacccccaagttaggttttctatcttgtctgcctattaagttaggttgcagtttgtcaatacggactcaaatatagaagtacggagtccttcttaaggccatatttagtttgcattaacactatgaactaaggaaggaaaggaaattgggggaatgaatatatagcatatataaaagcctgaaagtaggacaaaaaggacaaaatgaagctttttgaacaaactaattcggtatggctgaaggatagactgagaggcagggagttaaaagagatgaaacagaagcaggaaatgggcccaaagaatgcatttggaccattatgtaagacctgtggggaacaattgaaagattttaagaagaggcatgaattgatctgattttatatcaaaagatcactgtaatgtagagaatagattggaatggcataagcctgttagacagagagggtctacttttagaggttatttccattatccagatgagaggtgataatggaactggattagtatcagyaaagatgagagaaatgggccaggttggaaaagtatttaggagacagagccgacaggactcagtgactagattggattggttggatgagaactcgttaaggatgtcagcaaggtttctgaattaaacagctgcataaatagtgatayagtttttaaaacattagaaaatacaaagctttaataggaaaacatgataaatttagttgtttcacttgaagtgtctgtggcatctacaaataaaagagttgactgtagaagaatctgaacctcaagagaaagatctgggaattagagaggcctgtggtatagatagtattattactattttacaaataagtactgttggttctgtggttcaattctgttgtggatttaataggcttttgttgactgatataataactttaaaatatatgggaacttcctatggttattcctaagcaatccacatagccatataaactttggtatgtaatcatcttgaaaatttcctcattttttaggtttttgctgttttttaaaaaaaaatctttaaagtttatcccattgtaacataaatgtggttggtaggggtaggttggtaggtaaggctgtgtggggaaacaaccaacagagccgtttctggaagtaggaaaactgaaagcagatgtccttgtctccttgtctccagtgttcttctgaccccctatccacatcaaaatggacactacctaaccaggggattcctgggattggggctgccctgtggatgccccagccagccacagggctcagaattgattggatgtatactgaggctagagtggacaattgccaccaggtggtgccaaattgcagcctgagcccagatgaatttgaatttcacaggacacctaactagctaggtgtacaggcttgcctttatcattttaatgtcacagtaatccaactctatgttttatgtaatctttggggatcatagtttcttcattatggcagatttaactgtagttagagcttgtatcatactaatcttccacacagtaaaaagtaaattataaattacttcttttgaaatcttagaacttaaaatggctaaagaaagaattttaatatttcctgttataaaacatgaaattcataataagtttacacatttaaggttgtgtgtgtgtgtttaggtaaattaatcttttgctttggcctgagatgtgtaattatgttaattactagtattttatcaaagtgtgctgttacaataagttgaaatggatgaagtacttacacttgcatatttatatttggtctccttatctctcctccaataaactttttttttttttttttttgacggagtcttgctctgtcacccagactggagtgcagtggcgtgatctcagctcactgcaacctccacctcccgagtccaagcgattctcctgtctcagccttctgagtagctgggattacaggttcgcgccaccacgcccggctaattttcatatttttagtacggatggggtttcaccatctgttggccaggctgttctcaaactcctgacctcaggtagtctgcctgcctcggcctcccaaagtgctgggattacaggcgtgagccaccatgcccggccccaataaacattttctaaagaaactgaaatgatgattaatgaaatatattttgcctttaatttgttgtctatacattggaggatattaaaaggatactttttcttttctcttctttaatatggaaaaggcacatggaacttactctgtccaatcttggtatctgacctgcagtcattccactagttcttgaagttaaagtattgagagaaaagaaagagagtagaagatataaagacttaagaaaagggcaattataaatgaagagagaacttggatatttagatacatcaaacatactgtagttgaaattataatatgtatgtatgctttggtccagtttgtgaattaagcttttttgtcttttctgtattttctagttacttaaaattccactttggagctgtaggaaatgagtgaaaggtactacagtgctgagatgtattatataaataacttcttgcttagtaggtattatgtgacagaaatgttatggaccctcttatgcatttggaaataagacattctgtgagtgggagtatattatgaaagagatttggatcaaaagactgaacttgatcctggttctaccacttactagctcagcagataagtcacttaatatccctgaagtttaatttcttcttttataaaatgggctaataggctaggtgtggtggctaacacctgtaataccaacactttgggagactgaggcagatggattgcttaagtctaggagttcgagaccagcctgggcaacatggcagaaccccgtctctagtgaaaatacaaaaaaaattagccaggcgtggtggcacaggcctgtagtcctattaaggaggctgaggtgggaggatcacctgagcctgggaggtcaaggctgcactgagccaagatcatgccatttgcactccaccctgggcaaatggagtgagaccctgtctcaaaaaataataataactaactaataatactttttagggtggcccgtgaggtctaaatgaaataatatatgcaaaaagtacattataaattatagatgtagatgagttattttggtaccttgtgcctatgtagaatacttgaagaaaatattttcatctgttatgttgacagtttaaggaaaatcaccattatataaaagtcatctgataatattatgggattatttatcattagaagatactaatacaaaatatatattcttaagtgtttatctccatagcatttaaccagttttcttaaatgacgtaatacagacgtagagggtctacatgccattcttttctgtctaaatttctgcataagatggctagcttatgtttcctaattaggttatgagataataaggtaaagggagataaattcagctgattaagtttttccataaagtaaaactacctttatttaaggtggtcttgttaactgtaaacacagagctattctgagtggtgctctacaaaagataatagaggtattcatgatgctcttgatgcagtacagaatctggaaattgaaatagctttacaattgtttgaaagggggtaggcagtagagaaaaagagattgaaaagatgcttttaagtgcaacaattagtattgctttagtgattttattttcctgccgaatcaataaaaaccatcttgaccacaatttatcttccaaaagtactcaagaagaaactttaatgatataaacttgaaatttatgtagaatcttagagtgatattaaacaactttgaatcttgaatctatttacaaaggttagttgagtatatgtattgtattacaatggtgaatttaactagtgtacagaggttccagtcatcattttaaaagtgtatgtcctcattagtgcttaagcaaacaaacaamcttcttttgttcatatcttamcaggtatctgtataatgttttaagttcttcyatggaaaaatttaatagtaattactttgtcttttcagttagataattcttgaagtatatggctctgcagataactctctcagcatcttctcaaatattttaaattaatttttattatcagttatcttttattgttaactatattctttactccttagatgtttacaaygtgtgttcactgcytcattaataatacttaaaaatttcaagctctgtagggtgttccagatatgaagcaaggtaagttcaggttgcataggaatttagatttacctttgtggtgtaattcgttgtgtgttaggagaggctggtaaagtaagattgggccagattttaaaggttctgttgtcagtggggaatttccagaggttttatagtaggaaagaaacatgacttactcattttttataactacggttgcaatgcggggtggattatagttgaagaaagcctagaagcagggagatcacgtaggaggctgttgcacagcttaggtgatgaaaataagtagaaagagaaaatgatggatgaatttaaagaatacgyaggagaattggcaagatctggtgattgacaggaagtgaacctcaggaacgaccccaacttttctacctcagtagtgtcagagtgattggtgataaggcatggccattagctccagaatgcagactttttgagacagagttttgctcttgtcgtccaggctggagtgcagtggcacagtcttggctcactgcaacctctgcctcccgggtttaagtgattatcctgcctcagcctcccaggtagctgggattataggcatgtgccactatgcccagctaatttttgtasttttagtagagacggggtttcgccatgttggtcaggctggtctggaactcctgacctcaggtgatctacccacctcggcctcccaaagtgctggggttacaggcatgagccaccgcgcctggcctaatttctgatcttttacagatgtggcagccctgaccaagctcaaaagtgcttatctgagatcacacagctttttactagagatgtttctctgctgtgccccagatttcactccacttagccctcagattagtagaaggaaccctaagctgctaaagcccctccaacagtcttctctgttttccctaggatgccattaaaaatagtatcactttcattttatacaataaaaactttgaggaaacattgctgtaattatcaacctttaaattaacatcacgttttaatttacattttcatatttaggtagcatagtaagcatagttactatttattgagtacctattatgcgtcaagcattgtactcaacactttacatacgttgtagaaaaagaaacacattttatgaagtttaggtattaataaccgtattttacaagtaaggtaattgagacatcaactgtgacttgcctgtgattattataaacatttgttggtaaaaactagatacatctgactctgcaatgcagtgcacactcccatttaactggtcagtgctatgtaaactgatcaaagatttcctatcaaaactacaattttgaagttaatttacttaaaatagaaattctgtctttttttattattatactttaggttctgggatacatgtgcagaacgtgcaggtttgttacataggtatacacatgccatggtggtttgctgcacccatcaacccgtcatctacattaggtatttctcctaatgctctccgtcccctagcccttcaccccaacaggccccagtgtatgatgtttccctccctgtttccatgtgttctcattgttcaactcccacttatgagtgagaacattcagtgkttcggttttctgttcctgtgttagtttgctgagaatgatggagaaactctgtcttttaagagaatttgcaaacgacattccatgcttgagggctgagtatggatcattagagctttataaaagcatctgtaattttatttacacacacacacacacacacacacacacacacacacacacacacacacacacacacacacacacacacacacggatgaagtcttactgttttgcccaggctgggtcttgaactcctgagctcaagtgatcctccccgccgacctcagcctcccaaagtgctaggattacaggtgtgagccaccattcccagacaagcatttataatttttgaagttagcaaagaggactttttcttttcttttttattttattttattttattttaagttctatgatacaaatgcagaacatgtaggtttgttgcataggtatacatgtgccatggtggtttgctgcacctatcaacgggtccatctaggttttaagccccacatgcattagctgtttgtcctaatgctctccctccccttgccccccacccccaagttggctccagtgtgtgttgttcccctccctgtttccgtgtgttctcattgttcagctcccacttatgagtgagaatatgtggtgtttggttttctgttcctgtgtttgctgaggatgatggtttctagcttcgtatccatgtccctgcaaaggacatgatctcattcctttttatggctgtgtagtattccatggtgtatatgtaccacattttctttatccagtctatcattgatgggcatttgggttggttccatgcctttgctactataaatagtgctgcaataaatatatgtgtccatgtgtctttttatagtagagtgatttatattccttttatagtagagtgatttatagtccttttggtatatacctagtaatgggattgctgggtcaaatgttatttcttcttgtagatccttgaggaatcgctacactgtcttccacaactgttgaagtaatttacactcccactaacagtgtagaagcattcctgcttctcaccagcatctgttgtttcttggcttttaataattgccattttgactggcatgagatggtatcattgtggttttgatttgcatttctctaattatcagtgatgatgagctttttttcatgtttcttggccacataaatgtcttcttttgagaagtgtgtgttcatatccactatcaagcctttggcacccccatactactccaacaaagatgtttttataccaaagcccctaagaccttcatgttgcccaaatccagtagtcattttctcagttcttaccatgcttcaccttactagcagtatgtaacacagttgatcactccctactcctgggaacacaatctttagcttccatagtgtcacacactattaaatttttctcttcctcattagctgcacctactcattctctttgttggttcctcctcatcttcttgacaacttttgcagctgcctccatggcatttccacttggttatctattaataatatttatcctaatgtgttcagaagcaaatttctgttccattctacctcccaattctgctccaccttcagtcttacccagttcgattaaagacaactctattcttccacttgcccagaccaaaaacctgaagtcatcttttttcacattccatattctattcattagcaaatccttttggatttatgatctctatctcacgtatattaccttgcttcaagtcaccattatctcttgcctaaaaattactgcagtagcctcttaagtggtccccagctttcttcctcgccctctccagtctcttagcacagttcttgttaaatgttaagttggatcactcctctactcaaataaaaaggctccccatcattaaacttagtaaaactttaaatgattacagtggcctrtgatcctacctgatcagtattcagttatcctatcctcatttaggattttcttctggtcactcgcatagtcatgctggcctcctgttcttttacctgtaggtgtgctcctacctcaggtcctttgtattcagtttccactgcataaccatctactcctgatgatacacctgttcttgtggtcttttctgactttgttctatgttgtctttgtttttaatctatcaacatactacatatttatttactttgggtttttttcctactagaatgtgatctccatgagagtaggagttttcatgtatcgttcagtcctggactcccaggtaccagtgcctggtacgcagtaaacactcaatatacgtaatatttattgaatgaaagaatgaattggtactactttttagaaattaggtggctgttggtttagatgaaaacctactcaaaggtttataatggatttgatcaggactgagtgtcgtttgaagatatatagtagttactcagttaaccatctaccagattcattctgtttcattttgatatgttaccttttatcctgtcagctactttgtaaatcttaacacattaatggatttaagcaaatattttgcattttggtacttcaattttttataatttttcaaccataatttgggttcaatgtttatctactttgtgcttaagttttcatatctagaaacaaacaaaaatctgcttgagcaccaattgtcttcagtccattttatgctgctataacaggatacctgagactggataatttataatgaacagaagtttattggctcacaggtctggaggctgggaagtccaatatctacgtactggcatctggcaagagccttctcactacattatcatatggcataaggcaagaaggtaggagacagagcaagggggagccaaactcacccttttataatggcaccattcccactctcatggcctaatcaccattatcaggtcccacttcttaatactgttagaatggaagttaaatttcaacatgagttttggaggacaaaaacttttaaaccaaggcaccaactataataaaaggttaggaaagtgtagcattttcagtcaacaatgatctcaaaaagtttctactcttaaaatgtatagcttctcccaagaaatttattaaataagatttccactttgcttatttcgtttttatgtcctgctcattaacttttcagtcatctatgataaaggtaaaactacagtcattgaatagaaacaagataatctacatgcaacccttctattttatgccatcttaaaaacaaaggcatcagatatggaaatgagcagttttatgttgtgtccaggaagacgctggaggtagagatgataaattcaaacacttttcctataaataagcctgtcatataaaacagcctattttaatcctttgttgttctaactagaaaaatatatttacttctattagccaaaaatatttttacatgaagacagagggaagagtttggattgcttagttgcgcctgctgagctcttctgatagccatggttatttttgtttgtttttgtttttgttttttcactatttatgcttggtaaattttaagttctgaggcattagggatgtttattcaggctcagacgtattccttgcattgccaaactctgatttgatactgtttgaatttcgaagggtcctaaagtttttctcattcttctgacatttttcttaccacttttcagatataaatgtagattcagcctattggtactgtgaaatttatcatctagtagtaggcaaatacattctaccctgtacgttagtctattgttacgaatgttttataatgaggttttcaagtttcagttgtgagctactgttgaataaacttctgtgtattaaattatctgctgcacaaatggcactatattgcatatgaattatgtctattttgttataatattaaaacccttttatttaagtaaatgattaagaacttaactcttggccgggcgcggtggctcacgcctgtagtcccagcactttgggaggccgaggcgggcggatcacgaggtcaggagatcgagaccacagtgaaaccccgtctctactaaaaatacaaaaaattagccggcatggtggcgggtgcctgtagtcccagctactcaggaggctgagccaggagaatggcatgaacccgggaagcggagcttgcagtgagctgagatcgcgccactgcactccagcttgggtgacagagtgagactccatctcaaaaaaaaaaaaaaagaacttaactctttaagtttctcatttgaatgttataatttaagtaaccatacctcttggtttgtctaagaaagtagtggtttgtgtgtgtttctttggcataatttttaatagcaccctcttttattctaaaaagtgcaccaggttgaaaaatacattatttgaatactctagttataaaagtaggatactcacttaccctttgcatttcacatagtatttatttaagatttattttcttcaatctttcctctcaatatgtctccatcccacaacatagggtgaatgggaaaaatacatatgtgtatatgggagatacatagaattgctaggaaacaacatgaaagaatcatgaaaaacacagtgttggaatctaacgttaactttatacaagtattttaaggatgacatattcagatttttgtattttaaaacacttatctttctttgttataattacatttgattatacgcttggtttggacttctaaaacttgagcttcgttagcttgtacatgctacggatagcttctatcaatttttgaagtttctcttttgaagaacatttgaattcctgtaatttgttttgtaattgtatttctgttatattttctaatgcatttaacatttgaaatggattacttattatatgaaagttattgtcttatctgtggaaggaatacatctagcattttatcaaacagtttatttttgaaagagcatgttatatactgtgggccataaaagctaatgtatagtatattcacaattctttcaaggcttattttgatttcccatctattggtgccttgaggtggtcatgtaatataaatctcataatgtcagaatttctcaaggagaaaacatctgtgaagcaaaggaaattttaagaggcagcatagtatgattcacagcacagactctggagccaaattgtttgggtgcacatttggactctgtagcatacttcctgtgtgactttaagctaatacttaacctctttgtgttttagtcttatcatttgtaaaatggaggtaatgatacaactgctttgtgggattgttgtgacaattaaatgagttgtgatatgtaaagtgcttagracggcttctggcacatggtaaacagtatgctattgctatttattgtcagtagaagaatacattgagtttttctctctcagacttcatatgaaacctgtgaattggtaatattaaataaagtatctatttcttataaggaattatgctgcgttttgctaaagaatgcaggttgtggactggatatggaaggtgtggtacttgataaggagattgggtttacacagaaatgttacccacaaacacctgtgagaggacctcttggtagaagccttagcttcttctggtccattccccagttcatttctgttttctctttctgaattgctttacctatttgtccttcaagacccaacttacatgtcacttttaaaaaatgtttcactttattcacctacctctcttactccagtaaagaataatcaactccttctctttgtggccatagaattttgtttatgccttaacatagtacttaacatagtacccgctaatcatacctcctttcacaagccctgatgttagcttgttctaggttttatttcattccctttgtcttgttttcatttctcatgtccattgttgcaagaaaggaaatgttattagggactgaagcttctccatctaccaattgagcattcgtgattcattagtcctgtaaatgtgctctacttgtaattgtgctgccgaaataacatatagaataatgaagctgtatttgagaaatgaacattgaaaccaatttgtggtgatttactgactaaaatatttacatcatttcgaaatgaaaaatatataaatgtttaatatagtttgagaactttatctataacattaattttttatgtttcagtttgtttgagaatagaatatttttgaaggttgttgcaatcaggatgacatctgaaaataataatatgccattttttgatagctactttagaatgcacttccacttagtaacccacaaaagtagtttcttttcttttcaataagagttatctatactccagcatttctgaagaaactattttatttctggcttatcaactattttactgacaaatctctaatggttgacatttttaaaattttaaatttgttgttaatattgatggcagcagcggcccatctggagcagctgttgtaaagatgccagctgcagtgggggaggcgcgtccagggctgcatgctccactgagccagcaggagccggaaacaggcagaaacccagaccccttccgagttggaggggcgggagccctcccaggcgcagctgcagtggcccagtcgcagctgcggacccaggcattccctcactatcttcggcctagggagcccccttcccccacgggttcagaaatgcctgttcccgctgcctgacctctccctactcccagcacccactctgatttcagagcaaagttgaggccaagcctgggcactgttgcaggtgtgcccgctcttggggcattgctgacaccccagccccctgccacctcggcctcctctggactttggacactgacaagcacggaagggaggctggccaaagtgggggatgagggtgtcttggtgcaggcctgcaggtgccctttggcactccaggctgggcgccaggttacagctggttgatggcggcaggaggcaggctggcttctgggcggaaaggggtgggtccctggtgaagccccaccctcaagccagggatagcctggagcatgggagctgcgccaccagtttcacagaacggagtgagaacttacagtacttttttcctctggcccacccattgccacctatggaccaatcagcatatacttcctccccactgaagcccacaaaaaccccagactctggcagacctctggacgatctgcctgcagagaggagctaccaactgtgggtctcctctcagctgagagctgagcagatgtagagayaacctgcctgcagagagaatctacccactgtgggtctcctctcagccaagagctgagcagacagtgggatggcctgcctgcagttaggagctacccattccagatctcttgagagctgtactgctgctcagggaagcacctctttgycttattcatgctccggttgtctgtgtacttcattcttcctggacacaggatgagaacttgggacctgcttaatggtgggactgaaagagctgtaacacaaaaagagctgaaacatgcccctcactcgccacattgcaacaaggagagaattgctgcmgccctttggggagcccagacctaggagctccctgagcaagggctctgacacctgtttggggctctgcagttcctggcatctccaagcttccggacaccactgcattccccggtgccagcagtggaagctgctttcagtatgcctgtccagtcgcagcctcacaggaagcctggagccgcctaccccacggcagccggtgtgccctgctgtgtgcagtggttgaaccctgtactcactgacttgctcacgcaccccttgctcacacaccccttgctgctctgcacttggcttgccctcagcaggtgtgagatcccggccagtatagcttgagccgagtacagcctgtgaggccgagtgggtggaacaagcccagtgggcctgagcataactcgggcaaaggcgccactggccacaaaggtttccagctgacaaagtgacgccccaaggatcctgtgacagcaccaccatgcaaaagactagattgagtactggtacagcaaatatgactactaagcatttctatccaatattcaatagataggtttattcaaactttatggctttcatgactccctactcatattctgtatgaataataaaaaataataatttccarcccagtttttcatgagagatagtgtggcatgatgtaaaaagccctggctttggagtaagaaataactggattcaacttatggtcctcttaggctgtgtgacttgaggctaggtatatgagctctctaaacttcagtttactcagctaaaaagtaggttataacataaagggctttgtagggattaagtgagcaaaatcatttatattacattctttttatttatgttgtaactgctagagaaggagatttaaaaaaaaaaataggtgactatctgaaagaaacttactgttggtattttttttttattcaaagtttcatcttgattaaaaggcaaaagttttgatctttggaagctcatggctagttgtgtaatctcccagttagtcattgttgttatcttccagctccccttaactgacactaaatgtattctttctatcaatttcagttccttcctactgtcctcacaactgttaagtagatgacttttccagtaccctaacttcatacttctttgagccctacatgaatattgaccttcatctcagatctacttaatttagtcatactaattttcatacccgatcttgttagccaccaaaattctgccactgaaaagtgctgttctacctccaaatcaccattctccagtcttccatcttgcttgtacaactattacactttgacttaatctgtcatatcttatcaggacctctaattctttgtcccttctactttctcctgtctgtcaacctgtgtttccttcccattccttcctatataactgagacttcaaggttcttcatttcaatgattctcttgctcgtatcccaaaccgcacttttattttgattctccacaatatatctttcacttaaaatattttatgggacatttattaacctccccaaacctcagttttctagtggataatatatgaataattacacctatctcattggattctcgtaaggaatacataaattactatatatacaaactggttagccaaccctttgacccatgcggagaagggtggtgtgacatagagatagaccatactggcacctacactggtgtatcctgctcttagatactcaaccaagccaagcaggtttatatagtgtacactttgggtccccaacttctcagatgggtccttaagattgtcagatagtccatctttaagaaagaacatagataaatcacgcatttgaaataactgaaatccatgtttaaaatttagaaatctccgagaagcaagggataatgctgtggctgaaaaggaacgagcagtgatggctgaaaaggatgctttagaaaaacacgatcagctcttagacaggtaagcatcataaaaatagaaatgttaaaactcttccattattgtttctgttacatattcttttagaaaatgtattttaaggagagaataattttcatttcaattgaggagagactaattttcatttcaataattttcatttcaattttcatttcatttcaatttcatttcaataattttcattgcaattgctttatttttacaatatacaattattgtggatattgaaaatgtggtatagaacagttcagttactccagagagtttccttatggcccttcagtccttcttaactgctactactcaagaggcaccactttctgatttctgtcacaatagattagttttgcttctcttagactaaaaatactcttgtgtccaggttctttcattccactttgttgttgtatcagtagttcattccttgttgttgctgagtatgaatatattttattcacctgtcaatggtcattttggtggtttccagtttgttactatcgtgaataaagctgccatataattttttgaaagtgtgtgtttttatttatcttggctaaatacctaggagtggcattgttcatcattgggtagataaatgttttacttttaaaaaacctgccaatggtaacaccaaagtgattctaccattgtatactccctagttttttttttttcaaaatctatatgttctaaagtatgtgttttggaaggaggatatcagagagaatgatatatctttaatttaccaatagaaaatgatatttattttaatagccttgttaaaaggaaaataactgatgggcattatggtaaatatcattacttcattaaacattctacactttcaattgtttgactgcatagagagtaaacagtggctaccttatttttttaacttttcattttaaaattatttcagaaaagttgctaaaatggtaaaatttctgcgtaccgttcacatactaataaacttttgaaattaagttcaatgggtcttttaattgttaaatgaagaccagattaatttgaggtataagcaatacataaaactaaaatttgaggcaagtcttcatataattaacctattgtaaaaatcttttagaatggctcaaattgtcatacttctgaattcacatcaactttataaacttggcctatggaagaattttaataaatgttatattgaagaagtcattcctataatgtggaagtatgtcttattctaaatatcatgctatcgggctaggcactggaaggctgaggcaggtggataacttgaggctaggagtttgagaccaggttgggcaacatggtaaaaccccgtctctactaaaaatgcaaaaattagtagtgtgtggtgatgcatgcctgtgatcccagctactcagaaggctgaggcacgagagtcacttgaacccaggaggcagagattgcagtgagcagagatcatgccacagcactccagcctgggcgacagagtgagactctgtctcaaaaaaaatttttttagtttatctaaaaaaaataaagatcatggtgtaaaagatcatggtatgtaaatcagctcctttcattagagttcctataaagcgtttgttttatattttattacgtgtaacgcttccacttacaaaactatatgatgtcccctaaagattcatttgactttgtgttgatgtcagtttttaatgtgtagttttagggatgtatatttttagggatggctctagaataagatttatgggcaaactaataaggtttaaaagaaaacgtaagatattacctagtaaatcagaacttacattcatcacttgatagctactgtgtggttttgtaaagttggagagaataatatatctgatcataaaactgaccaatttatatttatcgtaagctacactcttaacctaaatccttcttatcctacttgtatgtacatttgcaactgatgttcatccgaaggccatgcgatactctaatacctaaaagtatctattaaacaatagaggattcaattatttaatgtttgtatagcacttagaacagtgccttcctatgataactactattatcatagaataatttgtccaatttagtgttgttgtgaaactttactaactgaattttgttcttcacaagttgatatctttccaacgaatttttcactaaaattttagataaactggaaaacctcattttcaaactgccagataggaggaggcttatttttaataattctttgaagtcatagtaargccttgcttattcagagcccaattttcagccaaccttaaatatttgtgatagttttaaaatcaagacaaggaaaaaaaggtgtttctagacaccactaaaaataacccttgagcagcaaatagagctaatgctcaggactgtaaaggacattacagaaccagagacttatgaataaatgagtgaatgaatgagaataatatctgggaatgtaaaactcaaaataagcttaggctttaacaaaatgcttaaaatagctaaagttacttatctgttttttaagatataatatcaataaatgaagggaaaagtatccctggttaggactgtaatgttgataaatgacatttttaaaagtagaattctagatgtaccatcagtttaattctttcttaattaatatataaattcagtgcagttcatgtcaaaattttcaaatgactttgaaacttgacaaaccaacactaaaaattctttttcacaattattatgcccattcttgtacatttactcttccatataaatttttatagttacagtttttacgttatgccttcatgtgaagttcaattttggggtagtgtacatagagaactaattttatttttcatgaaaatgtcagtttccttaagttaaactatgcatttaatgtaagccaaatagaataccaaaaatatttttttgaaaccagacaaataagttctgtggcttatatggaaaaattaagtaagtgcatttctaaataagaacaatgaattgtgacaggtcactagggtagccagctaaggggaaaagaaaattgagatccatacctcataacttacaccaagataaatttcatatggatcagagatttaaatgtaaaaccattaaaaacctaagaagccataggagaatgtttttataatcttgaattacaaaaggcctttgcaacttaggagttatagaagtaataaattgataaacttgattccctacaaatgaaaaatgttggtgtggcattactgccataaggaaagtcaaaaaacaaatgcaaatgtaatcttggaaaaaatatttgcaacgtctgtcacagtcatgtgactgattttcccttctccaaatcaataagtcaacattaaattcatattaaaattatacctattttcagctggacatggtggctcatgcctgtaatcccaacattttgggaggccgagttggttggatcacctgaggtcaggagttcaaaaccagcctggccaatatggcaaaaccctgtctctactaaaaatgcaaaatattagcctggcatagtggcacgtgcctgtaatcccagctacttgggaggtggaggcaggagaatcgcttgaacctgggaggcagaggttgcagtgagccgagattgcaccattgcactccagcctgggctacaagagtgaaactctgtctcaaaacaaaaacaaaaacaaaaacaaactatgcctgttttccactaaaaaccaaaaggttgataatacattgtgtttgcgtgggtatggaaaaacaggcaatcttaacattagtgggagtttaaattggtacaactaatatgaagagtaattcgataatacctatcagaagtacaaatgtacattgtgtgtgtgtgtgtgtgtgtgtgtgtgtgtgtgtatgtattatgtgagatggagtctcactctgttgcccagtctggagtgcagtggcacaatctctgctcgctgcagcctctgcctcccgggttcaagtgattctcgtgcttcagccccctgagtagctgggattacaggcacgtgccaccacacccggctaatttatgtatttttagtaaagatggggttttgccatgttgcccagtctggtctcgaattcgtgacctcaagtaatctgcccgccacagcctcccaaagtgctgggattacaggcgtgagccactacgcccagccatacattgctcttgatcaaggaattttatttctagtacgttatcctgcaggtatacttgctaggttcaaaatgctatatataccaccttatttactgtagcatagttgacatttaagcagtagttaaaagaattgtaattcatgaatactcttacagaatacaacaatgtagttgtacaaaaggaagtaagtggctctttatatcaggaccaggaaaaatctattaacatttattgcttctggagaaggaaattaggtgttgcatggttggtggacagatagagattttgtacctcataaatatgtaccctcttttgtacctcatacatattgaaacttacaatgtgtttttttcttttttgtgtgtttttaattaaatttaaacaaagagtggttattaagaatacttatatacaagtttcaaatcatagttactgagaaacttcagaaattatgtttttaatactcctggtgaacaatgggagtgaataaagggagtcaacaaataccatcttgttttcataaaagggaagaaggtagtagattcttgcaactattaaggaacatattagtagattacattacataacatattttgataaattatactctaataatttgatgcaatcttacataaactttaagcaaattacttgactttttttaactataatggatgtaagtactttgataaacctttgcttttttcattgtcagacgtgatgtttctaaccatttaggattgctttgagccttagatataatatattttaagtgtatggcatagattatgctcagtaagcagccatgcttgcaatggtttttaagattgctgctgaaagaagcaagtatcaccaagagttaggatgggttctctaaaaataaagaagactacatttcaatttttaagagatatattgcaggggtaaagcatggaaatgagttagatagggaacaagggatttgataagactttccatgacatccttttaaacaatatggggaaaatatgggagcaattcaaggccaggtaaatggattagtaactactgaagggctttatccaaatgttgttagagaattattaattaaaaaatgggtatatggtactcatctataatatcctgcagtactatatttctgcatttttgtcagtgatttcaggaaaaattaaaaccatatttaacaaatttgatataaaacaataacaacaaattaattgaataatgaagtaaggatctaatagatcttttcaggcagaagtaattaactgaatgaattttaataggaataaatgtaagatcatgcagttgggtccagaaaacctatggtttataggtttataggcttagatgtgaaatgtgaaaatgacctgcatggtttcaatatggagatattatcctacagtaatagaagttatatgtagaatgtgatctgtaattaccttacctatagaattatgctgataactgggcacccaagctttaaactaaaaggtcttcagaggaatatggccataactgcaaaaagattcaaaagtgccctattagtgctaggctgtaactacctacaagtattttaagcgttcacatatgaaaaagctggatttcttacttggcaagacataaagtagtagaattgggaccactgggtaatcactacaagaaagcgtaaagatagtaggacttttcacaatgccttagcatctgatacattctctatcagtagaagtattcaggcataagccaaattcagtagaaatgtgcttgtaaaggttgaagcatcaagtgggtagcttgatgagtttaaagccccctttcatcctgatgtgacaaccgtgtaaaagagttgacgcactcattaaattaccatgcaaaagaaatggtgaacacaagctaattttgaggatattatttaaaagatttctgtagttcgctttccctgtgtttttttaggggtgtgtgtgtgtgtgtgtgtgtgtgtgtgtgtgtgtgtgtgtgtgacagtagagagacagagaatctactgaagttattttgagtatagagtgcctatgttgcctatgtgtttaaactcatatattttgggaatatcgtatatattttgtatatagtgaagcttaaggaaaaatattttattcttcagaggttaaatttttaatattcaaatatgtgattctggcttcctttgtcacttcctatgttttaatctttatgcggaatgtgatttccctgaatcatgcttaagtaaagcctctggcatgcctatacataattttctagtcaggtataatttgtctcatctttttcatttatgttagaagtttttatttatcaaatgccacatttttatgattaaacaacctgtgttataaagagaaatgtatggaaacggtgtgccatttttcaaacgagtgaaaatggctttttactcaaagacttttcttttctacaaaggaaaggacttttctcaggcaaataaaagactcatgtawgtcccaattcaagctcaacaatttgataagtaacaaatacccagttttcatgaacatgaacagttattatgtcgtattctgttgctttgaatccctgcatgtactcctaagattctttcttccaaaaagtagaaattttaaaattcagtgtttgtagtagaataaattgaatacactgttacattcgtgggctactacatagaatactatattgggatctaaartgtaaggttgcaattcaaaattaattttaatagtgaacttttttcagttatggtttgttttatttaaaaaaatatattctatgcaaggtacagtggctcacacttgtaatccaggcactttgggaggccaaggtgagaggattacttgagcccaggagtttcagaccagcctgggcaacatagtgaaacctcatctctacaaaaaatgtaataattattacatataagaatatatattatgtacatatattatgtattttaaaagaattttcattgcaagtatttttaaattaatattgtttgaaattatgttttcaatcccaacttctctggtaatggtaggatttttgtcctcattttgtattagtacaaggccaaaataagaaggcatgggaaatcagataagcagagtaagtgatttttatgtcatattgggctagtttaaagcttgataaagaaatcagctgtcctaaatttcctttcagtgctttttttcatatttctatatacttttatctttatattttaatctgctactaggccagagtgcagtggcatgatctcggctcactgcagcctccacctcccagagttcaagcagttctcatgcttcagcctactgagtcgctgggactacaggtgtgtgccaccacacctggctaatttttgtatttttagtaggtatggggtttcgccatgttggccaggctggcctcaaactcctgacctcaagtgatcagaaaaaacacagcaatctttgaagcgaaaaatatggcaacagaataagatggtagaaactaatgagagaaactatatatgaaaatgatagtatagaaataaaaaggaatggaagagaaatagtatttagggtcaggggagttccagaaaaccatgttggtaatttgaggctggaggtttctagagcagaaaaaagaataaagtgatgaaaacagttagagaaaaagtaattgacagggaggacagacagtatatattcatcttcagtgtgccaagggaagaaaacaaaatggaccaggaaaaaaaacatttagagattcaatagaagaaaacattttctgaaataaggaatctgcaatttagaagaactcatcacattctgggtagtgggaagaggatgggaaacagcaatgttgtaaatctaagtgaagttacagaacatgaatgttaaaggaatagaattagaagtatctgcgcaaaataagtaagtcatttactaaggaaaaaataaatctaagctgcatgcagtggcatgcctatagacccaggtacttgggaggctgaggcaagagaatcgctaaagtccaggagttgaggaccagcctaggtgacatagtgggatgcccatctcaaataaataaattaattaatttggttgagctcaaggttttcttccataataatactttatttatttagcaatatttattaaccaccaagcaccattttcaggcactgtgattaagggtttgacaagatgaaaggctctctgtcttaatggaacttgtatttctgtgatgtaaatcagaaaatatacaaataacaataatttttagagagtagcagttatttgaaatatatgaaattgagtatgattcagggaggtttgcagtctgaaagatgagaaggaatcagtcatgtgaggtcccatgaaacatattacctataaggccttcctgaaaaacctactggaaattgtaacttcaccaaagaaggaaagaatcaaagaactcatggactgagatgtcagggtaaagaagaactggaagtgaacgtttagtgtaaaatgtaatcttaatgacctttgtcattttggttacaaaagattgtaatcataattgttaacaagaaattataacataaaaataatagaagtagaggcgaaatagcagaaacttgcaactaaaattagggaattgatggtaagagaaatagtgtttgtacatatataatgttctcagatttcatgaaagaatcaatagttttatgaagaaatacatgttttaatatataatttaaaactataaatggaacagactatatattttgcatactaccagagggaggaaaaagatcaatcacaggctatataacaaaggacagacagcaaagcaaacaccaaagaagtaaaaaaacagagaccataaattaagatggaagaaggctacacccatcttttctaatagcaattgtaaatgtgacaaacacaccatgtatataggaaaagaaatacagtttggattaaaaaataaaattttttccacattaataagtgactcagggccagggcgcggtggctcacgcctgtaatcccagcactttgggaggccaaggtgggcggatcacgaggtcaggagattgagaccatcctggctaacacggtgaaaccccatctctactaaaaatgaaaaaaaaaaaaaattatccaggcgtggtggtgggcacctgtagtcctagctgctgaggaggctgaggcaggagaatggcgtgaacccaggaagcggagcttgcaatgagcagagatctcgccaatgcactccagcctgggcgacagagtgagactccgtctcaaaaaaaaaaaaaaaaaagggactgaggatttttaaagatggaaaaaagacaaagtaatacagaattaaaactattctgcaataatttattaaggattgtcttaaaataattcagaaccttgagaatccctctgtaatgacactatgtacacaataaagatatactcaaaaatctttacgtgtgagatttccaagagggaaagtgcttattttcccattctgggttccatgcccagcctaggcagctcaactgttgccagaggcaatgatcacattttaaaaacatggtttaggggtatgtatactgtctagataaagttctaaataaaaagcatgctgaacagataattcagttaattgcttattatggttcctgcttcaaaacacatttgatgaagcaaggaaactaaactcagaaaatataaacaagttggaatcatgttgttaattcataagcacttattaactaaatcctgcttaaggccacattaaagttacaattacggatatatatttaagtgtgtgactcataaattagcttaaaaatcaggttcattcatcttacagaccttgcttgagagtgaggaggatggggtgttccatggtcttttctaagtctagccagctgcctcccaaatgtgtaattcggggttacacgttgagagagtagactgaatcaatacaaatatgtaagtgttactagaaaaagaactcaagtacatgttcttccgattattcatcaatagcatcaaaaggaaatgatgtggatgaaggaaacattatatgtgtgcacattttttaggatgtttcttagaaatctagcgtcatagttggtcattatgcttgtgaactgaaaaccagagaaagtaagagtgagttgtgtgtgtgcgcatgtgcgtgcatgtgtgtgtgttcatacagctttctttataggctgctgctctgttgccatagggggaactttttatagatttacatttggtaaatatacccacatccaaaaaaagacgtatgaaaaattgggatgccagctaactaaatcaactcataaaaactaaagttaagggtaagattattttccacgattattttaaaatatgatgtttactggaaggaaagtccagagaattaccacagatgaagtgtgagtgtatttctcccacttgtaaatgagctcttatttcctacagtgtatattctggtccacaatgagtcattttcaacatgtttcagtttaacttctaatacatttttaaacttggcaggcaaatttagatgaacattacttccagttttagagactgcttctaaattatacttcagtggtgtagtcatcatgaaaagttctttcagtaaaaggaaacaggattgattggaaatgtatgttttggaggagcaaaaaaatggttaccatttttaaattttgttactacataaaccctgttaacattatcttaaaaagttgtagatgtgaggtccttttatggatagaagatactttagagaagagaatatatgatgtatcctagataataataaagttaatatttattaaacttttactatgcctagcattgtttaactgttctatacgtattagctattttaatgcctgcataataggcagtagtatgttttctgtaagccattcaggccgtgtttctattagaaaacatgaagcccggcacagttctggccgtttgactaaaactttatgtttgtaaaaactagcaatttatatagagaattttacatagttgccagctctgaataagtatttaataattaccttgtataaatttatgcaatcctgtgaatcttctggcaaatttcagtggccaatctatctactgttatcttttaaatatgcttgatttttgttactataatttttacactgtgtcttattatttttaacactttaaaagttcataaaaatttagtttgaaaaatgcttcaagatgattgcaagcattgcattcattttgcaaatgaggaaacaagtctaaagaagtaatatggcttgtcctcagttacactgttactagaaacggagccataattacacatctgttctctttgttcccatcccagttgttctttctgccacaccagtatgttatacttagtaaacagtatatgaagcataatatgtgtgaagttgaacatcagtaggtatatttttgttctcaaatatacacatcaaaaacaacacaatttaaaactatactgtattaatttcatagggttgcaatgataaattgccaaaacttggtggcaaaacaacagaaatttattctccattctagaggccagaactctgaaactaagatgttgacatggctttactgtctcctaaggctctaggggtaatcctttgcttgcttcttccagcttctgggggcctccaggcattccttggcttccttggcttgtaaccgtatcactctagtctctgcctctgtcttcatgtggctttctcctttgtgtgcctcttatatggatatatctgattgcatgtacggcacactcagataattcaggacaggtctctcatctcaagatgcttaacttaatcacatctacaaagactctttttccaaataaggtaatagtcacagcttttgggagttaggacatggacttctcttttttggcagggttgggggcaccattcaacctaccacatataccttttaattcatgtgaattatatttacttgagttcttcaataaaggtaacattttattttgaaatgatttaactaaaattttctaattttaggagttactgaaattctatgatatttctatggactatctttcaacctactagctgttgaacaaaatcataccttagagattctagaatctgccatttgatctatgacatacatttattatgacttaaaagtcttcctgtgtgacttttaataacattctttaagaacatcatgacagtgacattaagattaaagaaacagtagttatacatttttaacagatacagtataaaaacctagctttagacaagctatgttagcttcatttaggccatttaattgctagcaattaaattttgctctactgtgtttgagatcctttagatttgggatgctcttataatgactatttaatgttttattttcgttccttatttttttcattcaagtgattcctgattttaataaatgtttatgcataatgtgtatctttgtattatatatcccagatgtatgatcacttagtttctgcttctgtagaaattattgctagatgtgaagatatgctgaattcattttagccattgaaagtatattactgtaaatgaaaggaaaaacaaccaatatataagtctgtgcttcatacagttattgatatggtttgggtctgtgtccccacccaaatctcaccttgtagctcccataattcttatgtgttgtgggagggaccaggtggaagataattgaatcacgggggcagatctttcccatgctgttcttgtgatagtaaataagtctaacaagatctggtggttttaaaaatgggagcttccctgcacaagctctctctctttgtctgccaccatccacaaaagatgtgacttgctcctccttgccttcacaaggaggcctcctcagccatgtggaactgtaagtccattaaacctctttttttgtaaattatccagtctcaggtatgtctttatcagccacatgaaaatggactaatacagttattaatagaattaaatgaaattctttatttaaagtactcaaaaaatattaactattattattaccatcatctagttagttgatttttaaagtaagatgtgtctatgttctcttttcagcaccataaaggtagagcagtctctgactagatctggtaaaaaaatattttatgcagatgagtaaacttcactattacaatgagctctctaaagaaagagtcccctttcctcaacttactgtatattctaattgttagcaactcattcaattgggatttttcttgcatctttttgtaaattataaagaagatccatgtgttttaaaattgatgtgctttttaaaactccaaggtagtgtgttttcattttacaaatggaaagtgtcggtattttttgtaaaaagtagaaaattagtttatgcgtcttcaaatagcaaagcttaattagacagtcgcatatctatcattaaaattcaaatgttttaattcacttggaccccaaaygtgaatttctcttggctagattattcatagattctctgcatgtaatgatgcctatggtttctaaaattctttttgtctaaaatcatgaagatggcagatgcacaaaataatacatctctgggctgtgtgtggtggttcacacctgtaatcccaacactttaggaggctgaggcaggaggattactggaggccaggagttcaggaacagcctggcaacaaagtgagaccccatctctgcacacatacaaaaaaattaaccacgcagagtgggcatgtgcctataatctcagctcctcaggaggctgargttgaaggatcccttgagccttggactttaaggctgcactgagctaagatggtgccactatgcccctgcctgagcaacagaataaaaccctgtctctttattaaaaaagaaaaaaaaaaaaaagactatttctccttgccttcaggcaagaatgcacccagatcatcctagtctgataggctatccatatgcaaacctgtaaaggaactcacatacctgtaaaggtactcacgtacctgtaaatgacaatgaaatgttagcttcaaaatagtttatataagtagtttacaggaaagtcaaggtatgataaataacctgtcatttataagaatggaatgttctgtatgttggtgtaacaaaacatgtctattcttttgtgtcatgttttgccattggttaagccatacatttgattaagaagtaagtcagcagatacttcaacttggtatccattataaccaatatcacctcttcattatagaaacaacctcttccatggctgggtgcagtgattcattcctgtaatccctacactttgggaggccatggtgggaggatcactagaggctacgagtttgaaaccaggctgggcaacatagtgagaccccagctctcccaaaaagtaaaaaaaaaaaaaaaaaaaaagatgaaactacttcttccccattattgtctgtaccctaactaaatattaagcattccacttgagataccatctcacaccagttagaatggcaatcattaaaaagtcaggaaacaacaggtgctggagaggatgtggagaaataggaacacttttacactgttggtgggactgtaaactagttcaaccattgtggaagtcagtgtggcgattcctcagggatctagaagtagaaataccatttgacccagccatcccattactgggtatatacccaaaggactataattcatgctkctataaagacacatgcacacgtatgtttatcacggcattattcacaatagcaaagacttggaaccaacccaaatgtccaacaatggtagactggattgagaaagtgtggcacgtgtacaccatgggatactatgcagccataaaaaatgatgagttcatgtcctttgtagggacatggatgaaattggaaatcatcattctcagtaaactattgcaaggacaaaaaaccaagcactgcatgttctcactcatggatgggaattgaacaatgagagcacatggacacaggaaggggaacatcacactctggggactgttgtggggtggggggagggggaagggatagcattaggagatatacgtaatgctaaatgacgagttaatgggtgcagcacaccagcatggcacatatatacatgtgtaactaacctgcacattgtgcacatgtaccctaaaacttaaagtataataataataataaaaaataaataataaaaaaataaaaaataaagcattccacttataagaaagttattagctctgatcgcctctctttattcttatgtatgagttttcattccacaagttttagacactgtttataaagtataaggtataccaaggcatagctaaaggttgtggctacttaaccccccacctccacacacacacacatatatatatatctttaatgatagagaccactagagcagtattgacttaaatggctcaaatatttcatgagttttcaataaaaaagactagcaatagtaattcttttgagtttatttaggtagaattatgaaaaagttatcttttttctttttattaattttgtttgtaaaaattataatttaattgtataagcacttttatgaatttttaattgcagataccatctgataaatgttataaatttgttcccacataattgtacatgacatacaattccatatagctaaactcattttccattaccattttataatagaacctaatggaaattaattaccatgactgcctttttcctgtgagaattaagtctccatagcccattctatgaactgttctctgccttccttaattctttaatgtatagatgaacctaacattcccttcctgtcgatttcaaatgtttaatgttgcttgccttgtttccttttattttaaatgagagccgacattatgaactcagcactttactgagtacatcaaaaggcaaaagagaaacgtrtctctccccatggtttcagatgagaatctggagaaaaatatgtacgtgtgctcagatttctctttgttggagtatggactatggaaagagaaataaaatgccaaagtatctctctaaactttcctatggtgggctagaaattgttcaagtcaatatttattgaacctttgtgcatgacacactgtagagaattttaaaaattaaaacaatttcagttttgaaagagctgaaatacatatatacatatttatattttaaagcaaaattttatatatgttaagaagtctgttgtaggctgtgaatgtccctatctgttttggaaatggccttttagaagaggtggtacatgaaacaagcatttgaagtgtgaaatttgacatgcagatataagagaagactattccaaaaattttgtaaacctaaatatagaagaaacaaaagaattttcaaaaaaaaaaaaaacagataattcattcacctgattcagagtgtacaagtagataggagataaggatagacagtttcattttttggtagaatgtcagaataaagagcttttatttacttcagtgtgcagtgagggctgacatgatgagatttacattttagagaattagcttggcagtaatatatgcatatatatttatggtaattcaagatgccctgaataggagttcctgaagtccagatgattggtaactatggcctgaattggatggtggcatagataataaagatgggaaaattggttttagaaatacaacttggacgtgatgggtagtagagatttttccacctgttctctattgccatcctccatccctcacaaagaaaaaaatttttaatgcatttagatcatattccaaaatatagtttgggccatgtttctagtcaagtggtgtctgtctgtctgtctctctgtctctctttctctctctcttttgagatggagtcttgctctgtcgcccaggctggagtgcaatggcgcaatcttggctcactgcaacctccacctcccgggttcgagcaattctcctgcctcagcctcctgagtagctgggattacaggtgcccaccacctcacttggctaatttttgtatttttagtagagatagggtttccccatgttggccaggctggtctcgaactcctgaccttgtgatccacctgcctcggcctcctaaagtgctgagattacagacgtgagcctccgcgaccagcctcaagtgatctttctctaaaagattgcagtcatgattagagcttccccttccacatcatcttttcctagctctggaaaaataggttggagctcacttgcaccacttgtcagtcttctgccatatatacatgctaatatcctctcttaaaccttatcagagttctacgcaagaactcttagttggagtttttactgcaagcccaactaataacatagtcataattttatttcctgttagctactagcccctttttcagaagcctcatggtaagggaatgcttattttaataaagcatttagacattttttgaattcaccctaatatcatttaatagcacccagtccctgtatcaccactaacagatggatcctcttacaatagaggcaatataagttacgtttaagagtacagtttctggagggtaaatagcctaggaggttatgatactggctctattgttcctgggtgcatgacttcagggaagttacttaacctctatgtctcagtttcctcatgtataaaatataataatagtaacttatagaattgtgaggattaaatgagtgttagagatagtgtttgttacataatgtgttaaatattagctattgtgattattacgggattcagtaactgacaataattgaaagtatcttggagagttatcartgattcctgcagaattttctgggtagtttgagatgatagtgatttcattatcagaaataggactttgagaaaacagaagtgattcatgtgttaatgaaggctataattttgatttaggaattgtacttgaaatgctaaagcaccatttaggtatagaaatagagttgacatataagaataaggatctcgaacctgggagaaagaacaagcctatacataaagatttgggatatatcaagaatgctgaaacctgtagtaagtgccctgaaatttgggaagagatttaataattgctgtggagtaatattgtgctaaatgttttaggagttttgtttaattaattttattctcagtttttatttctcataattgctttgtatgaggaaattaaggctccaggaggttttctgaaaatgccatggctagaatttacaaataaattacaaaaactttaagtaactttagcaagattayaggatacaagttactatgaaaaaatttaattgtatttctgtatgttagcgctatacatttaaaacttggaaattttctaaaataaacctttacaacagcagaaaaacatcaaatacttagggataaaattaacaaaatatgaagcaagtacaggacctgtacactgaaaactagtaaatattgctgaggaaaaacaaaaacctaaataagtggagtaagatatcatgttcatagatttgaacacttaattttgctgtagtgtcaaattttcccaaaccgacttacagagtcagtgcaattctgatcaaaaactcagcagactttttttgtagtctaatcagctaacctaaaatttacatggaaatcgaaaggaccagaacatccaaaacaattttgaaaaagggagatgaaggtgcctagatagttcagtgaggaaatgataatcttttcaacaaatcttgctaaaccatttagataccatatacaaaaaagtgcacctccacccctacttcatacatacaaaaattaatttgtaattcatacatctaaatgtaagatcaaaaactagaaaaaaagggaaaaccttagaaaccttgagttatcaaaggttgcataaataggacataaagaacgtgaaccattaagaaaaacttgttttctttttttttgagctggagttttgctcttgttgcccaggctggagtgctgcagtgggcacgatctctgctcactgcaacctccacctccccagttcaagtgattctcctgcctcagcctcccaagtagctgggatttcaggcatgcgtcgccacgcccggctaattttgtatttttagtagaggcgaggtttcaccatgttggtcaggctggtctgacctcaggcactccacccaccttagcctcccaaagtgctgggattacaggcatgagccaccacacctggcctaagaaaaacttgatattccaacttggctggtagttgggggacaaaaagaaaaactcgttaaattggactttactcaaaataaaaaaaaaaattgctcttctgttaataaaggagaaagacaagccatagtcttgaggaaaatatttgaaaaccacatatctaataaagggcttacatccagaactcttgcaacttaagaagacaagctactcaatttaacattttttaaaatggccaaaggatttgaacagccacttcatgaaagtagaaatacagatgaccaataagcacaagaaaagatgctaaacattattaatcaccaggaaaatggaaattataccaaaattcattaccactrcaaccactagaatggctagattttaaaacacggatattaccaagtgttggtaaggttgtcagttaactcaaatgtccacacagtgcttatgtgaatgcagaatcacagtcactttgtgtgactgtgtcaaacagtttgacagtttttaagaaggttaaacataaacttagtataagacccagcattcctatttctagttatttactcaagagaaatgaaaaacctatatacatataaagacttctgtgtaaatgtttatagctgctatatttctaatgtccccaagctgaaacaactagtgcatcaaactaaatttgagtttacacatgccatggaatactacatagcaataaaaaaggaggaaactacttatatgtggaaaatatttttattataaaagttctatgttgaaagaagacaaacacaaaagactacatagtgtttgattccatttatgtgacataatagaaaaggcaaaactaatgacacaaatccaatcaatagttgccaagagccaggggtggaatgagagaactgactgaaaagcagcagcacagagagtttttgggagtgatgggaatgatgttawgatcatagtcacagttgcatggccaaaacagttgttgaaacttatgaacttgcacacttaaaattagttaattttgtatgtaaattatgctccaataaaactggttttttaaatggcttaagtggctgtttattttttagagcagttttgggttcactgcaaaattgaaaggaggtacagattgctcatataacccctacccctacacatgtatagcctaccccattatgaacatccccaccagagtgctacatttgttacaattgatgaatctacactgacaaatcattatcacccaaactctatagttttcattagggttcactcttggtccggctactttttaatactttcatttctggtccaagttcactcttaagggttgtacattctgtatgtttggacaaatctgtaatgtatatatctatcaatgtagtatcattcagaatagtttcattactatattattttactgtctccatggttttatctttttcaaaatgtcataatcatacagtttgtagtcttttcatactgtctttttttacttagtagtgtgcatttaaggtttctccctgtcttttcatgacttcatagctcatatctttcagtgctgaatagtattctattgctgaggtgtatcacagttcatctgttcacctactgaaggacatcttgtttgcttccaggttatggcagttatgaataaatctgctataaacatccttgtgcagttgtttggrtagataagtgtttaattcctttgggcaaatatgcaaagagtgtgatcttatggtaagagtgcttagttttgtaagaaaccacgaaatgtgtcagtgtagtgtgggggaaaaaaaaaagaagaaaccaccaaactgttttccaaagtggctatatcggtatgcatctccaccagcagtgaatgagaattcctgttactccatatctttgccagcatttggcattgccagtgttctggatttgggcctttctaatacatgtatagtggtatctcattgttgttttaacttacattttcctgatgacatatgatgcagagcatcttttcacgtgtttattggccatcactgtatcttctttggtgatgtggctattaaggtctttagcccattttttaatagggttgtttgttatcttgttgagttttaaaagttctttgtatattttggataacaacccttcgtgagataagtattttgcaagtatcttctcccagtctggggtttttattttccttctcttgatggtgtctttcacagtgcagaaacttttaactttaatgaagtccagtttattctttttttcatggattatgtgtttgttgttttgtctaaaaagtcatggcccagaccaaggttatctagattgtcttatgtgttatccttaggagttttataattttgcattttacatttaggtatatgatttattttgagttaatttttgcaaaggtgtaagtctgtgttcagattctttttttttttttttttttgcatgtgaatgtcctattgctctagcaacatatcttgaaaagactatctttccaccagtattccctttgtctttttgtcaaacatcagttgactgtgcgggtctatttcagggctctctattctgttccactgatctatttgtcccttcttttgccaataccacactgtcctgttcctgtaactttatagtaagtctcaaagttggatagtgtcagtctgctagttttattcttctctttccatataatattggctattctgggtcttttgcctgtctatattaactttagaatccgtttgtctatatccacaaaatagattgttgggattttgattgggattacgttgaatctataaatcaatcttgcaagaactgacatcttcacaatattgcgtcttcttacccatatatgtagagtatttttacattattctttgattgtcttatcggagtttttagttttcctcatatagatcttgtacatattattttagacttatacctaaatatttcattttaaggggtgttaatataaatgttactgtgtttttaactggaaattccacttgttccatgcagatatacaggaaagtgattggcctttgtatattgcccttgtatcctgcaacattgctataatcacttactagttccagtagttttcagccaattctttcagattttctacataaacagtcatatcatctgcatacacagttttatttcttccttcccaatctatatactttttcttttcttttcttattgcaattagcatcaacttcgaatatgatgttgaaaagttcctgatcttagtaggacaacttcaggtttcttaccattaagatgttacttgtaggatttttgtgttattttttatcaagttgaggaacttcccgctattcctagtttactaagagtttgtatcatcagtagatgttagattttgtgaaatgctttctctacatctattgacaggatcatgtggtttttttcttcctcagcttgttgatgtgatggatcacattaattgattttcaaattttgaaccagccttgcataactgggataaatcccacttggttgtggtgtatagttctttttatgcatgaatggtttcgatttgttaataatttgttgagggtttttgcatctatattaatgagagatgttggtctcttggtttcttttcttgtaatgtcgttgtctggttttggtatttgagtgatgctggcctcatataataaattagaaagtattccttctgcttctagcctctggtggatactgtagagaactggtatactttcttccttaagtaattggtagaatttaccagtgaacccatctgggcctgtccttctgctttggaaggtttaaattattgattaaatattttaaaacacatgtaggcctcttcagattctctgtttcttcttgtgtcagttttagcagattgtgtctttcaaggaattggtccattttgtctaatttatgaagtttgagagcacagagttgttcatagtattcttttgtttagtgtccatgggatctgtaataatgaccactgtttcatttcttttttttcttttcttttctttttttttttttgagacagagttttgctcttgttgtgcaggctggagtacagtggcacaatctcagctcacctcaacctccgcctctctggttcaagcaattctcctgcctcagcctcccgagtagctgggattacaggcatgcaccaccacgcctggttaattttgtatttttagtagagatggggtttctccatgttggtcaggctggtcttgaactcccaacctcaggtgatccgcccacctcggcctcccaaagtgctgggattacaggtgtaagtcaccatgcccggccttcatttctgctattagtaatttaggtcctctctttttcttagtgtagctaaagttttactggttttattgattttttttttcaaagaaccactttagatttcattggtttttatcttgatttttgtggtaattattttcttagtgcttactttggatttaatttactcttttttttctagtttcctaagatagaagtttagatgattgattttagatctttcttcttttctaatatacgtatttaatgctgtgaattttccaagcacttctgcgttccacaagttgtatttttatttagtttaaaatattttctaatttctcttgcattttcttctttgatgtatgtgtcatttagaagtgtattgtttaatatccacatattttagaatcttccagttatctttttattgttgatttctagtttaattacattatggtttgagagtagagagcatatgatttttattcttttaactttgttcatgtgtgtttatagcctgggatgcagtctgtcttctgcatatctgtatttcgtgtgagctttaaaagaatatgtattctgctattgttgataaattgtgattataacctgttgattggtggtgttgaattctactatgtctttaatgattttctgcctactggatatgtccatttctaatactagcrtgttgaagtcttcaactatagtagtagattcatgtatttcttcttgcagttctatcgtgtattttgacatctgttcttggacatataaatgttaaggattattatatctacttggaaaatggacccctttatcatgtagtgcccctctttatccttgataacttttcttgctctgaagtctgttctgtctgaaattaatgcaagctactcccagtttcttttgagtagtgttataatggtatatttttctctatctacttttaatctgtatgtatctttatatttaaagtgcatttcttgtaggcagtatatagttgggtgtgtttttaatctattaattggtgaatttagagcatttacatacaatgtgattattgatacactgtaggtagatttgcagctaccatatttattactgttttctattttttccctcattctttgtttctatttttcactctttttcttttttggttttaattggcattatgttgttgggcacataaatgttaggaattatatattttctgggaggaagaacttcaaaaaggaaagtttgcaaatgtaagctaaatgtgagatttcaggaggttaaagtgtttttagtatcaggaagtcaaggagatctacaatcctcccaaccagagaaggaatgttctgagttaggagtgtagggaaagaaagaaaattagaatataagcaattttaaggtagagaggagggrattgaaataaacccttgttggatagatcttgaccttagtaaaaggaagtcatcaaatgacaatggagagggctccaaatgacctgagagtcttaataaaagaaggcagtttttagaatgacaactatagagaatacaataatgtaataccttgggaataaaagaattccaagcagcaataagagctaggtcatggacttggtcagtatggcatccctaattttccacagcttctcttaattcaagtcagaggtcgacaaactatggccgataggccaaatccagcctaccatctgtttttggacagcctgcaagctaagattggtttgtgtggttttttttaattatgagggggaaataaaaataaaaataaatatttaatgacacatgaaaattatatgaaatgtagatgttagtgtatataaagttttattggaacacaaactcatttgtttacatattgtctatggctgcttttatgctacaaccgcacatttgagttgttgcaacagaaactttttggcccacaaagcctaaaatacttactctttggtcctttacaaaacatgtctgcatgccagctttcagcagcatcagttaagcagcagtgataattgtctgtctgtttcttggagatcattcacaagcctgaatagatgggtcaccatttatcaatgctttcgagatatcagcatgcatatctttcccatgcatctctttagcagggtaggaaaattatgactttgaacgggtaactctgtttcttggtaaggataagatgttacattccactgaatggaagaaaaatcaaattctgtgcttccaaaattccaatattttaaagtattagaacatctcatggtttatagaaaaacatggaacatgacaagacatcttggccagactaaaaattggaactctgcagccaggaaacatacaaagtcacctgttatttttcttatgacaagctttaaaacaaagtgctttggcaaacttgaatgtttaacacatagtgcttactgtaccaatacagttttaagcattttaccaatattaactcatttaattatcctaattacctaatgagattatcactgttatgctcattttataattatgaaagctgagacacaggtagtaaagagtggtatggagtttgaactgatgcagtctggcttcagaacccttgcttaatatagttacttgtgaatatttaaccctctgaatctaaaataaaatttgaaactataaaaataaatacttaaagtcacattacattgaaaaatacttcaatctcatgaagcttcaagattatttgagaccttttttgttctagatcccttattatatatgtatgtattcaacttttaggttcaggggatatatgtgcagatttgttacttagcccagaaatttgaggcagacttgaatgcagatttcagctttgctacttacttgggcaagttgttaacttctctgagtctcagaatctttatctctaaaaagagaataactgcttgcccactttcaccactgttattcaacattgtactagaattcccagctaaagcaactagacaaggaaaagaaataaagggcagtcaaattgttaagggagtagtcaaattatccttgttattagatgataggattttttttttttttgaaaacaaaatgcttcatgattttgtatgtcatccgtgtgcaggaaccatgctaattttctctgtatcattccaatttgaatatatgtgctgctgaaatgagcacaatgataggatcttctatttggaaaacctaaagactccaccaaaaaactattagaattgatgggcaaattcagtaaagttgcaggatacaaaatcagtgtaccaaaatcagtagcacttctatatgccaacaatgaacaatccgaaaaataaattaagaaagtattcccatttacaatagctacaaataaaattaaatacctaggaattaaacaaagaagtggccgggtgcagtggctcatgcctgtaatcccagcactttgggaggccaaggcgggtggatcacgaggtcaggagtttgagaccagcctggccaacatggtgaaaccccgtttctactaaaaatacaaaaattagccaggcgtggtggtgtgcacctgtaatcctagctacttgggaggctgaggcaggagagtcacttgaacccatgaggtggaggttgcagtgagccgagctaatgccatttcactccagcgtcagtgacagagcaagactccatcttgaaaaaaaaaaaaaaaagtaaaagatctctacaatgaaaactataaaacactgatgcaagaaattgaggagaacatacaaaagatggaaagatatattccatgttcatggattggaagaatcaatgttgttaaaatgtccatacttacccagagcagtctacagattcaatgcaatccctcttagtataccaatgacattcttcacaagagtagaaaaaaaaatcctaaaatgtatatggaaccacaatagacccagaatagccaaagctatcctacgcaaaaagagcaaaactgaggaatcacattgcctgacttcaaaatatactacagtgctatagtaaccaaaacagcatggtaccagcataaaaacagacacacagaccaatggaaaaaaaaaatagagaaatcagaaacaaatccatacatctccagcaaacttatttttgagaaagctgccaacaacatacattggggaaaggacagtctcttctatagattatactgggaaactgcatgtccatatgcagaagaataaaattagacccctatctcttgccatatacaagggtaaaatcaaaatgggttaaagacttaaatctaagacctcaaactataaaactactaaaacattggagaaacgctctaggacattgttctgagcaaagatttcttgagtgataccgcacaagcacaggcagccaaagcaaaaatggacaaatgggatatcatcaagtagaaaacctcctgcatagcaaaggaaacagtcaacaaagtgaagagacaacccacaaaatgggagaaaagatttgcgaacaatccatctgacaaggaattaataaccagaatatataaagagttcaaacaactcagtaggaaaaaaatctaataatccaatttttaaatgggcaaaagatctgaatagacatttctcagaagaaggcatacgtatggtaaacagggttatgaaaaggtgctcaatatcactgatcatcagagaaatgcaaatcaaaactacaatgagacatcgtctcaccccagttaaaagggcatttatccaaaagacaagcaataacaaatgctgatgaggatgtggagtaaagagaaccctcctacactgttggtgggaatgtaacttagtacaaccactatggagaacagtttggaggttcctcaaaaaactaaaagtagatttatgctggatcatatggtagctttatgcttgatcaatgattgctggatcatatggtagctctatttttagtttttgtgtatatcccaaaagaaaggaaatcagtatatcaaagaaatatctgcacttccatacttattgcagcactgtttacagtagccaagacttgggagcaacccaagtgtccatcaacagataccggataaagaaaatgtggtacatatacataatggagtattcttcggccataaaaaagaatgaaattctgtcatttgcaacaacatgaatggaactggaggtcattatattaagtaaaataagcsaggcacaataagacaaactttgcatgttctcacttgtttgtgggagctaaaaattaaaacagctgaactcatagagatagaaagtagaatgatggtaaccagagactgggaagggtagttgggagaatggggcatgggtaatgggtacaaaaataatagggaggttgaataagatttatttggaagcacaacatggtgactatagtcagtaagaatttaattgtacattttttttagacagagtctctctctggctttatactggatcagtgattgctggatcagatggtagctctagccctggctggagtgtagtgacatgatctctgcccactgcaaacctccgcctcccaggttcaagtgattgtcctgcctcagcctcctgagtagctgggatcacaggcatgtgccaccacaccagctaattttttctattcttagtagagaggggctttcaccattttgaccaggctggcctcaaactcctgacctcaaataatccgcccacctcagcctcccaaacttctggaattacaagcgtgagtcaccacgcctggcctaattgtacattttaaaataactagaccaggtgtggtggatcacatctgtaatcccagcactttgggaggccggggcgggaggatcacttgaggtcagcctggccaacattgcaaaaccccgtctctattaaatatacagatatatacgtacatacatacatacatacatgcataaaataactaaaagagtataattggattgtttgtaacacaaaagataaatccttgaagtaatggatacctcatttaccctgatggaattattacacattgtatgcctgtatcaaaatatcccatatacgtactacgtacctataaaaattaaagattttttaaaaagaataatcctaaattttgtattagcagtttggagatgattaaatgaaaaaactgtttatacctgtatatgacagtaaataaaagcactcaaatgttagactcctttccttcgtattggtctctacacaccctgataggcatcatgccaattcaagtttcctcttagtataataaatgcctttaaagttcatcactggctttttattaatatcgcaagcctctcacaacccacttagtcatggttacaatggaaagtgagataaaaggaataagtgacagagcaataataaaagcaccaaatttcagccaacctagagaggaaaagcaacactttctgcaaggggaggacataagaaaagtgtagggagaaaagcaaggcccaggaaaatgtttgagagaagacatttcttcaaaataataatgtaagatgttaaaaattagagtttgtttaattaaattaatactgagttgctttgattatattaggctctttattatttcatttttatcctgaagtgttggagatggttaaataaataccaaggtatgtagacattttctggaacttttaaactttctcattttataaacagctgtagaaaataaaaatataattataacataatatgtgtttactgagtgcctaacataagattatatttactatctatttgtttgaacatcccaagatagaatttaacagaaatactaacaagtaattatttggtccattaagtctaatgagagaaataagaggtggggaaatagtgatttagttcttattatgtgatttagttcttattatgtcttctatttatgtcttctttacttctgttttgtatgccctcatgataaactttattacattcttgtaggtaggctagtgagtcacgcatagattcctaaaattgtgtataaaatttgtaataattttaacttgttacagaactcagatagagcctgtcatatcacactacttttgctcccttttttgcatttcttttttgtaagtatttttagaatgttgtcatgtctccttctaccaccttagccattatccacactgtatattttttggaagtttaatcttttttgtagtttggacatacctaacctataatcattttggcttctcttttcttcactctctgtaatttgttttcatcttttacggacacctaaacctggaaacaataatcttaattcactggttttttcatacttcagaagagactgcccctcatcaaattagtatttaatattttaatgttttctatcctggcttgaacctatttagcattctaattttataacacctaaaaacctcatggttactatgactccattcattcactcagtaagcattaagagttagtaatattctggatataccattatctcattaagagcttataatatgccagaatatttactagatcctaggaatccaaagatggattagacaagattcctgcactgaagtaacttgtattttaattgtacagtgtgttgttgtgagcattttacttttgttagctcacattatcatccagaactcaacatgcccaagttttcccccaagaattttgattcagaaagtctcaggcagaaccgtggcatctagagttcttagaagttccacaagtgattctgatggtcctccctggttaggctaggtaaagtcaacctcaggagtcatccgcatccttagaaaagaaaaaagtgttgctaatgatccatctttactaccagaccatctaggcttaaagacccatgactctggttgctgtattcaggagttttttggagtattccttagcccatttcagaacactaatttggataaattaacatttatagggcttccctattgttaggaagcagatctaaataaatgacttttacatccctttttgccttttacaatatgtatgttaaccatagtaaattcatttcttttcttgagctatatattactgaaaaataggacaaaagcatgattagcctccatcgtgctactattaatactttacactattcttcataaaagcatccccctaaaagtgctttttctaatgactttttaagattcagtttatatgttctgaatttttttctttagtgtagatcaacactgagatatacgttaaaagctgcatgaaatagagttttgagtgctatgaagcactaatataataaatactcttggttcggaggataattcaagctgaattttaagggtttgttgtcatgttgacacaaaagggaaaacagacccaatcagacctagtgttataaagtttttataacactgttataaaaattttataacagtgttataaaatgtttcactctaattttatctcatacatgcttttattttatggcaacattcctttccttacatttgtttcagttaagtactcttcacatacctgtagtacctatttttttgactttataagatggccagatattactacatgttgtttattttattaatggcattacatattttatttgatcatgatatgatagatgcattgaattactccaaatacatgcttgaaattcttataaatccatggtacagttgtcaaacatactcagcatttttaactcagcaaaaaaagacctctcacattcatttaagaattagcttgtaagccaaaaatgacagatgtagtattgcagctgagaagtgaactggttgaagaaatcatctaaatggcagaaacgtttggagaaatacccaaacttcttttaaattcctttctcacgttctttagtcatcattgttgcgacattaatgttggctttaaaagttttccctagtttgtttctttacaatttggaaaatttcacattgaaaacacctgagttaatagaactgtgttactctatagtttttctttttttttttttttccaactcactggaaatctgtgggctctataattttatatgtacattttgaactaatgtaattgctcccctaattttcatcaaaaataattttgattcagtatccaggtatatatttaaaatttttaaatatacagataactaaaaagcaaaagaaaacagttggtagaacaataggtagcagtaatgcacaaaagtaaaatctctaagataacattttgtattttaataacatgaaaggaaagtaatttcagatatgttctctgtaagttatgatatggatatatatgtgtgtgaatatagtttacataaaacttgtatactttttgttttcttaaagtaaaaaaattagaagttatagattgggtataatagggtaagtgtgcttatttttgtattctgagatctttcaaatattttcagggtataaaaaataactaaccaaagacctataccatatactagccactgatgtagtaatacttcatctctgtttagctaataacactttgttttgagaagtaaaggatatatctaagccaaaattatttaaatggaaagtacttaattttttatttttaaatttctcatataaaaattttttgagttgccttcagtaaaattaatttttaagttgaaccatgtaatgtaaaaatgtaattttctcctctcacctctcttttcccagatatctttacctgtatgggatattatttcttatttcttcaggatgtacacttcctttctttttatataactcagtgtccttgtgtgattttagatatatccatgattcacgtctaaatatgtatataatgagtcaagtttttatttttaaaagaaacacatcagaatatatggacacaaataagaataccctccaccaaggtcaatacagtagaagcccgtatgctttttccgaccgtgttggtattgctcaattcagttattttacagcacagttcttggaataacttttcattttaacagtcttcttccttcaaagagaagtttttgtttttggaaattcaaccattcagagtaaagcccattgaatttggtgggtgaataaactaggtatactgtttgttgtgaacaatgggtgagaaattggggagaggttaactatttaacaatgaaagaattgttgagaatggaaaattatgaggccaattgaaaatcttatttttgaaggaggtttaataacataagaagatttttaagataatattgggggaaggagagcaaattttatatgaaagcataattcatatgtaatatgcatagcaaacatttatagagaataatatcaaatattggtgaggagatggagaaaccatatttcatacacttagagttgcattttaaattgatgtagccatttgagaggaaaaatggcagtatcaaaatttaaaatcttttgacccaacaatttcacttcatggtatctttcttaaatgtttgcttgtgcatgggaggcaattcttaggatgatctttgaagcactgtgtataatgctttgaagcattttgaaacaatctaaatgttaatccgtttagaattaaataaattggaattaattaaatgattatgtccacattgtggtctattatatagcaaatgaaaagaatgaggtatagacatggaaaaaacggatcccaagacagtctacatgaaaaaaggaagttacagagaagaatatgtgtgatatgccatttgtttaaaaaaaaaaaactgatatatcaattcatatgtgatatacatacatgtttaaaaaaaaacaaacctcttagatacacagaaaactagtcacagtgattatctctcaaaggagaaatggaattgagagtagtgatagaggtctgggctgggtgcagtgacccacacctgtaatcccagcactttggaaggctgagataggaggatggcttgagcccaggatttcgacaccagcctgggcgacatagtgagaccctgtatctacaaaaaatacaaaaaaaaaagaaaagaagtctgtaatatttatttgtaatgtttggagtttttagcctcacagtggatttgataaattatttatagaattgaaaataaatttgaaaatatttacttgtgcagagaagaaaatttatgaaaatataaacagcttatccttataagcaagattgaattctcagttgactagacacatcagcttctgtccttgtcaactccaatttcttatagctgaatctaccaaagactgaatgtatctggagatttaggcccatctttgtttcacagttctttcaagtgtagaaagtttgtcaacctctgccccacttgcttgtggagtttaaaactaaactttcctgcccacacaaaagacttagcagtctatctctgactacctacttctgtgtattcttctaagctccagtattctttctttattgacccatctccccatatttcaacataaagttgaaaatatctttcagtgctttgttattagttaatttgcctaataactgaatactaaaaatccttccctgaacccttactggtactggagatcttgtgactttgcttaacttctcttgccagtctaccttggggcagggtcttacttcccatactctttatctgtacacagttgtcctgccacatacagataaatgctttgcctcagctgctgcactatcttactttcaacctggatcagttgttaaatttcttaatgcaagtaccatattctggccctggtcattacatgaacctcaccactgagttttagtactttttaggtattctgccttagaaaacctgtttaccgaatgagatttgataactgggttcaaaatttttaatgtaatacaagccatgaacattttgtgtacagaattcaaaaatcagttgtttctcattgaaataaaaaagattaaataagcagttaaaatgggttaaatatgggtctttcactgtgttacccaatgatgaccttgttaataagagttgggaataaaccatatacatgcgtggcttaatacatcagagtctaacaagtaaaacttcccctgtagagtctacatgtaaagactgccaatgtaaattttgttatgaaaacctgttatttgatgttttatccagtacttttattaccaaatatgttttcctgtttctgagactccactgtcacattgatgtctctcctgtggttatttctcagcatcccagaacatgtcctgctactgggagtttaattcatcctagcctgagagcacttcttatggattactttctttgtagctccctgtgtaatagctgattttcaccctttaacattttttctccctgtacttccaaacccrgaagtgctgttgcagtgaatattccttcagagcaaaccatcagttctagtcctttctgttatttttaaagtagtatttggtatatggttgggtcttatgaaaactaaaaacccggttacaaatgtagcataaggacaaatggagccaaattttaggcctggggatgagatggttgtgagaataggtggagattctctgtggaaaattttacctcttaaggttactatgctaataaattagaatatcaaacgtgaagttgttaatgtatgaataatactgacttacctcaaataagatgttcagattgagagtacgagatgagaagtctgagtcaacaaagtaaaatgtgatgggttatattagcaaaacaagttaagtgggagttacctgaaactagctcctgggcatcatcagttcctcactgttggagctacttttgtagctatgtttgttcaacattttcagagttcagtttaacaaaatacttacacaggcttaataatttgaggcagatcctttcacttacataaacaacatggaaatagactagtcctttagaattaccatttcattttacaaagcttcagtttatgaaacttagactatattcaaatttttaggagataattcttgttaccacctagatggtttattgtttaacttctgttaaattttctgtattctamatgtctaaatattgtttactgtttaacttttcaatataaggaaataatattagtgccaaaagtaactttcaggtgccatgtaatgaataaaaacaggtgatgctaaaagctaagtctttaattacctatttggagttggcagtgatatccgaagcaacatcccgaatccataaaaaggcaaaatttgcagtttaatcttttaggataaattatcttaaagatcaatatcacattctaaattacttatccagaatttatttcataatatggtctctgtatgtcctagtctcacatacaaagaaagtattgatttcacacatttaattcatttatatttataaaacaacttgcctcaaagagtacagggacatttgtatgtcataaaatgttgaattaatacttttttttagtaaaaggtatttttttttaccacttcacgcacactagaatgcataatcaaaaggcagacaatgataagtgttgttaagaatgtggagaaattggcaccctcgttactgctgatgggaatgtaaaatggtgcaaccctgttggaaaaaagttgggcagtttctcaaaaagttaaaaatagagtgacatatgacatagcaattgtgttcctaggtatataaccaagagaaatgaattcatgtttacacaaaaacttgtacataaatgttcatggtagcattattcatcatagccgaaaatcagaaacaacccaaatgtccatcaactgatgatggataagcaaaatgtgatgtagttaaacatttgaatgttattcggttataaaaagtaatgaaatgttgattcattctacaacatgaatgaaccttgaaaacatcagaaggccacatattatatgattccattaatacgaaatgttcagagtaagcaaacttttagagacaaaaagtagatcagtggttgccaggcctggatgaagagaagaatagggagtgactaatgaacatggggactttgtagggtaattaaaatgcttttaattagataatgatgtgcaaatttgtaaataagctaaaaaccacagaactgtgtatgttaaaagagtgaattttatggtatatgaattatgtctcagtaaaaaatttatcagtgtttgtttttctatataaaaaggtattttttaataaaattgtaaaaagttttatataattaatgccaggattttccaaaaaagttagtcacaaaaactgacattcactttaaaactttactgtatattaatgtgtaatgtgcattgtatggaacttccaccgatctgagacttgaagtagcccatggtgtatatctaatgcctatcttctctgattatattttgaatggtattttcactcactgacaggagtgaaatagcctttaaaaagcattttaaagtttatcttacctcagaaatgtcagttatgaatattatgtaatagcagaaagactatcgctgtgaagtctaatataaaattgggcttcatcctgaaatttactagcagtgtgttcctattaaagaaattatttgacatctctgagcctcaggttcttcatctgcaaaatacctagtagatccgttataagaattaaatgagataccatagataaaacagactatgctctctgcttcactgccctgcatataactcacatttcttctccctagaatacttcccaccccttacctcctcctgccttacacacacacacacacacacacacacacacacacrcacacgcacacacacccctctatacaaaccaagttaggtctccttcatatatgttcccactgaacctagggattaccctattgaagcacttaccattgaattttcgtgtttatttgcctgttttccccagaaaactataagttcttttaaaaaacaatattttatctaccaatgtatacaccttacctagcatactgactagcttaataaatatttgaataaatgaattttaatatcatacccagcattatacttggttcataataactccctgaaaagatacagtgtatgtgtattttgcttttctgttagaacacaatcaaccttaagtattttcaaatttatagtatgtggtgatttatatgttaagtggaaatgtttttattaccggttatacctatggaatgaagagaatgttccttatctgagttgtaatagcctacttgtaggtctatatttatcttcacagtttgtacatttttttcttgtaatatcaaaatatatgtatatgtactaagtttattttgcaagtgtttcaagaatttgtagtttaatatgcatatttcattgctttcttctccatctgacattatttagacttaggatgaaatagcaagctgggaaacaatgccatagatttaaaaaggcctatgagaagtatagaaattaaatcattctaagcaatgtaactgaaatttgctcttgccatttacaaaatgataggaaataattattttggctagaaagaatgaaaataagggtagaatggtgaaagttaattgatatgttcactgtaattacttattttcatacatatacctacytaaattatttataaaagctttgctgaataaatataaattattaactccacaaatatgggggagtagaaaacatagaagtaaggtttatgattacttaaatcattgagactgctttctttagagtgtcataaccattctgcttctttcaggtacagagaactacaacttagtacagaaagcaaagtaacagaatttctccatcaaagtaaattaaaatcttttgaaagtgagcgtgttcaacttctgcaagaggaaacagcaagaaatctcacacagtgtcaattggaatgtgaaaaatatcagaaaaaattggaggtacatgtacaagcttttctttcaacattagcatggcatgtaaactccctaagtacaagatttatattgagctttatttctcctataggatgtatcactatcctgcacaaaaaaaaaaaaaaaaaaaaacaaggaaatacgtatttcagaaagatgtatactgaaaaggactagaattgttgagaaacaaaaaaagcaagaaaagatgtcattcacaatagcaaccaaaaatatataatgacttggaatattttaaataagaacagtgcagaatgtatacgaagaaaactatagaacttcactgacatgtgaaatgaaacaccatgtttctgggagggaatgaagtatacattttttcagttttcatcaaataatatgatatgtttctatctaatcaaatgccagcatattttttaactgaaaataattctatagaacaactggaaggaaaaacatacagaatagtcaatatttttaaaagtactttttaaaaagaaataatggaaatatatatcacattttaaagtgtgttctgaggcaagaataattaaactgcacacaaaattagttcacaaatggtataaaatgtaaagccccaaaacatatttacataaatttaagaatttatacatggtaaaggtcatatttcaaatcagtagggaaagtatggattggacaataaatgatgctgtgataatcatttgaatatttagagaaaatagttgactcaatacctcataccrtatagcaaaattaaactcagatggattactaggctgcatatatgtacaatatataatatatatattatatatatatatagtgtgtgtgygtgtgtgtgtgtgtgtgtgtgtgtagctataaaggtattagaagtaaatacagatgatccaggggcagtgagtgactcacgcctgtaatcccagcacttttggaggctgaggtaggtggatcacctgaggtcaggagttctagaccagcctggccaacatggtgaaacctcgtctactactaaaaaaatgtaaaagttaggtgtggtggcatgcacctgtagtcccagctacttgggggttgagacagggaggattgcttaagcccaggaggtcgaggccacagtgagctgagatcacatcactgcactctggcctggcaacagagcaagactacatcaaaaaaattttttaaagtaaatacagatgaaattatatcttatgtttactttgggaattaatctgttaatctgaygaaagccaggaaagaaattatataggaaaaataaaacctgaatttgtttttaaaattcataaattttaaaattcataaattcataaaattcataaatttttaaatttatatttaaacttaaataatatttaaaataatatatataatattaaaggcaaaatagaaactgaaaaacagtatttgtgttatatatgacaaagggcttatgtccttaagtttaaaagatattttatcaagaggacatgccttcgccttctacataaataagtgggaaaaaaaaggaatggaccatttccaagaaatgaaatgcaaattgctaataaataaataaatgaaaatatgaattctcactgataastaccaaaatataaatttataaatttaaacttttttttttacctttagataggtctgtgtgttgtttttaaaatgctggcaagagtacccttaagtgggaaatctcatgagttagaaaatgaaacagcccttctggacattatggtaatctgtgttaaaagccttagaaggttgatccagattgtgaattttagctccagatcgactgcaagaacaaaccagcaatcctgagaggacccacagaccctctgaaggaagcggactgctcctgcaggacccggaagacaccccaaatactctgggaggtggaaagcctcgggcaagttttcaagcccaactcactctgggcctggaaacagactcttgggctgttgtgttggggggagccagtgggagcgagaccagcccttcagttttcgtgggaactgggtgaggcctgtgactgttggctttcccccatttccctgacaacctgcatgactcagcagaggcagccataatcctcctaggccacctccaccagaataggtgctggtatccatgatggagagacccatagacagttcacatcacaagactgtgcagaaaaccccagtaccagcctggagctgggtagactcactgggtagctatacccagaagagcgacaacaatcactgcattttggctcacgggaagccacatccacaggaaaaggggtagggtactacatcaagggaacacttcgtgaggaacaaaagaacctgaacaacagccttcagcccttgacttgccctctgagagagcctacccaaatgagaaggaaccagaaaaccaaccctggtaatataacaaaacaaggctcttcatgaccctccaaaaatcacactagttcaccagcagtggatccaaaccaagaaatccctaatttacctgaaaaagaatttaggaggttagttattgagctagtaagggaggaaccagagaaaggtgaagcccagtgcaaggaaatccaaaaaatggtacaagaagtgaagggagaaatattcaaggaaatagctaaaagaaaaaaaatcaaaaattcagtgaactttggacatgcttttaaaaatgcgaaatgttctggaaagtctcagcaatagaattgaacaagtagaagaaagaaactcagagcttgaagacaaggtcttcgaattaacccaatccaaaaaagacaaagaaaaaagaatatgaaaatatgactaaagcctccaagaaatttgggattatgttaaacaaccaaacctaagagtaatcagtgttcctgaggaagaagacaattctaaaagcttggaaaacatatttgggggaataattgaggaaaacttccctggccttgctagagacctagacatccaaatacgagaagcaccaagaacacctggggaattcattgcaaaaagattttcgcctaggcacattgtcgtcaggttatccaaagttaagacgaaggaaagaatcttaagagctgtgagacagaagcaccaggttttcctatagaggaaaacctataagattaacagcagattcctcagcagaaagcctacaagctagaaaggattggggatcccatcttcagcatcctcaaacaaaacaattataagccaataactttgtatctagtgaaactaagcatcataaataaaggaaagatacagtcattttcagataaatacatgctgagagaattcaccattaccaagccaccactataagaacagctcaaaggagctctaaatcttgaaacaaatcctggaaacatcaaaacaaaatckcttcaaagcataaatcacacaggacctataaaacaaaaatacaagttaaaaatcaaaaacaacaacaaaaaaagtacacatgcaacagaaagcatgatgaatgcaatggtacctcacatttcagtactaacattagatgtaaatggcctaaatgctccacttaaaaaaggtgcagaactacagaatggatgagaacttgcaaactaaccatctgctgccttcaggagacacacctaacacataaggactcacataaacttaaaggggtggaaaaaggcatttcatgcaatgaacaccaaaagcgagcaggggtagctattcttacatcagacaaaaaaaactttaaagcaacagtggttaaaagagacaaagagggacattatataatggtaaaaggccttgtccaacaggaaaatatcacaatggacctaacactggagctcccaaatttataaaacaattactaatagacctaagaaatgagataatcagcaacacagtaatagtgggggacttcagtactccactgacagcactagagaggtctttaagacagaaagtcaacaaagaaacaatggatttaactggatttaaactgtaccttggaacaaatggacttaacagatgtaaacagaacatttcatcgaacaactgcagaatacacatcctattcaacagcacatggaactttctccaagatagaccatctgataggccataaaatgagcctgaataaatttaagaaaattgaaattatatcaagccctctgtcagactgcagtggaataaaactggaaatcaactccaaaaggaaccttcagaatcacacaaatacatggaagttaaataacctgctcctgaatgagcatcaggtcaaaaatgaaatcaagatggaaatttaaaaattgtttgaactgaatgacagtaatgacacaacctacccaaacctctggaatacagctaaggcagtgccaagaggaaagttgatggccctaaacacctacatcaaaaagtctgaaagagcacaaacagacaatctaaggtcacacctcaaggaactagagaaacaagaataaaccaaacccagcagaagaaaggaaataaccgagatcagagcagaactaaatgaaatttgaacaaaaagaaatacacaaggtaaatgaaacaaaaagctggttctttgaaaagataaataaaattgatagatcaggccaggcacggtggctcacgcctgtaatcccagcactttgggaggctgaggtgggcggatcacctgaggttgggagttcgagtccagcctgaccaacatggagaaaccctgtctatactaaaaatgcaaaaaaaaaaaataaaataaagccaggcatgtggctcatgcctgtaatcccagctactcaggaggctgaggtaggagaattgttggagcttgggaggcagaggttgcagtaagcagagatcgtaccattgcattccagcctgagcaacaagagcgaaactccatctcagaaaaaaaaaaaaaaaattgatagaccattaacaagattaaccaagaaaagaagaaaatccaaataacctcactgagaaatgaaacaggagatattacaactgacaccactgaaatacaaaagattattcaagtctactgtgaatatcattacacacataaactagaaaacctaaaagagatggataaattccttgaaaaaatacaaccctcctagcttaaatcaagaagaattagataccctaaaaagaccaataacaagcagcgagattgaaacggtaatttaaaaattaccaaaaataaagtccaggaccagatggattcacagcagaattccaccagacattcaaagaagaattggtaccaatccttttgacactatttcacaagatagagaaagaaggaaccctccctaattcattctataaagccagcatcaccctaataccaaaccaggaaaggatacaaccaaaaaagaaaactacagactgatatctttgatgaacataaatgctaaaatccttaacaaaatactagctaaccaaatccaacaacatatcaaaaagataatccatcacgaccaagtaggtttcataccagggatgctggatggtttaacgtatgcaagtcaataaatgtgataaccacataaacagaattaaaaacaaaaattacacctcaatagatgcagaaacagcgttagacaaaatccagcatcgctttatgattgaaaccctcagcaaaatcggcataccttaacatcataaaagccatctataacagacctacagccaacataatactgaatggggaaaaattgaaagcatccctgctgagaactgaaacaaggcaaggatgcccattctcaccactcctcttcaatatagtactggaagtcctagccaaagcaatcaaacaagagaaagaaataaagggcatccaaatcagtaaagaggaagtcaaactgtccctgtttgctgaccatatgatcgtttaccttgaaaaccctaagtactactccagaaagctcctagaactgattaaacaattcagcaaagtttccggatacaagattgatgtacacaaatcagtagcacttctatacaccaacagcgaccaggcagagagtcaaatcaakaactcaaccccttttactatagctgcaaaaaattaaatacttaagaatattcctaacaaaggagttgaaagacctttacaaggaaaactacaaaacactgctgaaagaaatcatagatgacacaaacaaatggaaacacatcccatgctcacggatgtgtagaatcaatattatgaaaatgaccatactgccaaaagaatctacaaatttaatgcaacccccatcaaaataccaccatcattcttcccagagttagaaaaaaaaattctaaaattcatgtggaatcaaaaaagaacccgcatagccaaagcaagactaagcaaaaagaacaaatctggaggtatcacactacctgatgtcaaactatactataaggccatagtcaccaaaacagtgtggtactggtataaaaataggcacatagaccaatggaacagaatagagaaccagaaataaacccaaatacttacagccaactgacctttgacaaagcaaacaaaaacaaagtggggaaaggacacccttttcaataaatggtgctgggataattagctagccacatgtgggagaatgaaactggatcctcatctctcaccttatacaaaagtcaactcaagatggataaaggacttaaacctaagacccaaaactataaaaattctggaacctaacatcagaaaacccttctaggcattggcttaggcaaggattccatgaccagaaacccaaaagcaattgcaataaaaacaaagctggccaggtgcagtggctcatgcctgtaattccagcactttgggaggccaaggcaggcagattacatgaggttgggagttcaagaccagcctgaccaacatggtgaaacaccgtctctactaaaaagacaaaattagccaggtgtggtggtgcatgcctgtaatcccagctactggggaggctgaggcaggagaatctcttgaacccgggaggcgtacattgcagtgaaccgagattgcgccattccgctgcaccctgggcaaccagagcaaaactccgtctcaaaacaaaaagcaaaaaacaaacaaacaaacaaaagctaaatagctgggacctgattaaagagctttcgcacagcaaaaggaacagtcaacagagtaaacagacaacccacaaagtgggagaaaaatcttcacaatctatatatctgacaaaggatgaatatccggaatctacagtgaactcaaatcagtaaaaaaaacaatcccatcaaaaagtgggcttaggacatgaatagacaattctcaaaagaagatatacaaatggcaagtaaacatgaaaaaatgctcaacattgctaatgattggggaaatgcaaaacaaaaccacgatacagtacccccttactcctgcaagaatggccacaatcaaagaatcaaaaagcagtaggctgggcacggtggctcacgcctgtaatcccaacactttgggagaccgaggcaggcggatcacctgaggacaggagttcgagatcagcctggccaacatgtgaaaccctgtctactaaaaataaaaaattagccaggcatggtggcaggtgcctgtaatctaagctactcgagagactgaggcaggagaatcactggaacccgggaagaagaggttgcggtgagcaaagatcatgccactacactccagcctgggtgacaagagcgagactccttctcaagaaaaaaaaaaaaccaaccagtagatgttggcatggatgcggcgatcagggaacacttctacgtttctggtgggaaagtaatctagtacagctgctatggaaaacagtgtggaaattccttaaagaactaaaagtagaactaccatttgatccagcaatcccattactgggcatctacccaaaggaaaataagtcattatttgaaaaagatacttgcacacacatgtttatagcagcacaattcacaattgcaaaatcgtggaaccaacccaaatgcctatcaatcgaatggataaagaaactgtagtgtgtatgtatatgtgtgtgtgtgtgtgtatacacacacatgatggaatactgctcagccataaaaaggaatgaattaacagcatttgcagtgacctaaatgagattggagactattattctaagggaagtaactcaggaatggaaaaccaaatgtcacatgttctactgatatgtgggagctatgctatgaggacgcaaaggcatgagaatgatacaatggactttgggtacttggggggaagagtggaacagggaaagggtaaaagactacaaatatagtgcagtgtatactgccccggttgatgggtgcaccaggatctcacaaattaccgctaaagaacttaacttgtgtaaccaaataccacctgtaccccaataacttacggaaaaataattaataaataagggctgtgtggctttaaaaaaaaaaaaaagaattgattgttggcatctgagcctatagtctctgcatcagtaggcaatataccaagtgggtggtattaatctttcctcagcttttaaatattaagtaaacccccaaaataaaatggaaagaaaaaaagctgatccagtaattttacttaaaggaattttatctaaggaaatagagatacgtataaaggtttatataaatgatgcatgtcgcagcattatttattatgtaaaaattagaagtaacttaagtgtccaacagtagataaagttttcaattagcatattataaattgtgtattttgctgtgtccatgcactgcatgttcttgggtattttagatttggggaaaaggctaattaaaaacatggaatgaaggatgcagttaggaaattagtatggtcttgactatggtttacatgttcagtaaaaatcatcaatatacatagaaaaacatttgaaggaaataaatcttttttttttttttgagacagtctcactctgtctcccaggctggaatgcagtgtcacaatctcggctcactgcgacctctgcttccccagtttaagccatcctcccacctcagcctcccgagtagctaagattacaggcgtgcaccaccacgcccagctaatgtttttatgtttttcgtagagacaaggtttcaccatgttggccaggctcatctcaagctcctgacctcaagtgattccccctgcctcagcctcccaaagtgctaggattacaggcgtgagccaccgcgcccagccaaatatatccagatattaaagtttatctataaatggtataattatgggtgatttttatatcttcattctccccccctagactaagacctttttaaaaatatgcttctaggtctcagccagaacctggcacatagttaattgaattgatagtatgcagtactttgtaactgagtgtctattaggcagtaagcactgtgctgggcccagttacacaaattttaagaaatgattcctatcttcaggaaactaagaattttgaacagggctttgaatagagctttctgtaatgatgcaaatattctatatctgcaatatccagttcagtagccacttgccacgtgtgatcatttagcacttgaaatatggctacttcactgaggaaccaagcttctttagttaatcttaattaaattaaatctaaaattagctacatgtatttaatgactctggtattagactgcatgctctagacaattaaccagagcatacacatccttactattaggcagtggtaggatttgaaaacttttctccttagttttatcataaaagaaaaatggaaggtattttctgcccaaatagaatttcttctggcagtattgggtagggattggcctgtgggctttaggctcaacagacctaagatttgaacccagttactcaccactctctggataaaatactcattttctttgggaataataatagcaactgtttcataatgttgttatatctgtttggctcatataaaacaaccatttatgctcagtaccaattcatagaaatcctcaaaatattgttttgatgctatagaattttgttttagttaagttgggaaatgccgggaaaatggaartatcctttcccaaaagataattatttgttgggtaaaagattttttttttttcacttttcagatcccataatagtgtgcccactaataaactcaagcattttaatcttccaattttcctttctgcatatgaaggtttattttacagttacaaaaatatgaaattataggtcattaaacagaaactacaatgcaaagaaactgaaagttattcaattagaagcctttctcaattgaaaatcagatattaaagtagtttcccccaaattataatgcaattcagttacaggataaatatcataaaatagaactggtttgtctttattttggaaatacatgtgttgcatacatttgtcatttatccaaaatatcaaaatatttctttttttttttttttttttttttgaggaggagtcctgctctgtcaccctggctggagtgcagtggcaccgtctcggctcactacaacctccacctcccaggttcaagcgattcttgtgcctcagcctttgaagtaactgagactacaggcgcacgctaccacacccagctaatttttgtatttttagtagagacagggttttrccgtgttggccatgctgatctcaaactcctgacctcaggtgatccacttgccttgtcctcccaaagtgctgggattacaagtgtgagccaccatgcctggcaaaatatttcttttttaatggcattcatttgatattttaagaccacataatatagaaaatacacttataatactaggtgacaatattcctttacacagctgtatgcactggatttttttttaatgtctaaggtgagaataaaagattttgaagaaatacaccataaaggggggttgttaactaacaaatcagccttgactcattttaatgttttatttctacttttttgttctagagaggttatattatttaatatcgcacaactagtaagtgactgaactgtgattagaccttaacacctgaccaacctcactttaaatcccatacttttttttttttttgagacagagtctcactctatctgtcacccaagctgtagtgtgatggcatgatctcagctcaccgcaacctctgtctcccaggttgaagcaattctcctgcctcagtctcctgagtagctgggattacatgcacgcaccacaacacccggctaatttttgtatttttagtggagacagggtttcaccacgttggccagggtggtcttgaactsctgacctcgtgatccrcacatctcagcctcccaaagtgctgggattaccggcgtgagccaccacacccagcgtaaatcccatacttttaaccaccacaatatttaatatttattacagtaatctctccaagattacacttctggaaattactctgattagtgaaactaattaaagggcctcagaaaataaagccttagtgaaaaacataaaaatatattaaatatatatgtatgtttaaaaagacaagcaaaatttgtagatggtgtctacttataaagcaaatcaatgttcagtatttaaaacttttttcctatactttcttcaggaaaatgctgtagagtcataatctgttgcaggtgattctcccacacatcctttttttattgcctttagctggttacaaacaaaattgattttataacctccaaaaaattgcaacttgcagtttgcaaaggactctcatagacctgtcaacttggtctctggatgcaggtgactagtaattattatgctttgtttaaaggtcatatatggaaaaacacctttctaaaaaatgttgtggttctaaagattctggttgataaaactgaggcttgagggcatttcttaacgttgtgtgcccctattaaactgaagccttgagaaagcagagagattattcatttatcattgtgtcagcagtgcttaacacagtgcctctctcataatgaatcctcaataaatacttgatgaatgaatggtttgattaagaataatgtagtatcatagtttgaatcttttggtgggggggattctacaaagtatttttaagacaattcttatttataattaatttatagagaaataatttcatcatggtaaagataatggacttttctgggcttttacccagtattctcattgattgttaatttggagattatttatttttgcttaattattaattggcaaaggctcccwgaagcgttggctttatatatttgtctctgtttaaggcaaaattataattttgtattatcattatttaatctttgtattattcagttaatacatgtattattcaaagsaaggaaaattttactgtgagaactttatatttaatggattcctaaaattaatgggcttattttatgtatccatatttaaactgaaatgttcatgtattgatttttattaaaacaaatccttaatattatagcctaccatgggtccaacagtcaagttctctttggcatttcagaagcagtaataggtttacttataacaaccactcagacaaatccacagaaacagaaaattctctaatatggggtactagaggtattgggagatagccyacatcagtagtttttcaggacctctctttcacattatgaagatattttttaaattacatctctcgtaatggtttttaaatctctccttaaaataatatcttataaaatatcccatcttcaacattttgattccttatctctaatcatttctcctgtttttcttcgtgtggtggttttgcagggggaggtggggtacaaatgaaaaagtatcagctctgctgtgggaatagtcatttaacactgcctttactgattctctcttttgacagtggaattagtttcatcagccaccagattcttaatgaattacatcccaatgtaatgaactccatgtaagccccagataatgtcactgagtaatgatttttttataatgaattaacaagtttctagaaaacacattcccaacaagcaagaataaagaagaaataatgctaaaacacacattttgttttttctgacccaaccagagccactggaaatcaccataaaaatgctgttcccattttattccttctccactctccaaaggaatgtatatggagagtgagggataatgttttgtttactttgggggaaagttttgctgaaaattgaaggaaatgatctgaaataagttaaggaaaattataatttctgctcattgagaactgtaaataggtcttccttctccctttttccacatcacagaaaacatataatcatacacattttgtattgtgaactttatgtcattagagaaaatagttgtctttaaaagtgtttaattgtagagaattcaagataattaaattagtggaactctatttgcatgaactatttcatgcagaattgtcatatagttatatttcttacagtagcaatagtacttttcaacactatgttctaggtactctgctaagcactgtaaatttatcatctcatttaatttctttcaacagtgttttaaggtaggcctataaagaataagtaattgcctaagatcacagctagtaagtgtcaaagccatattgaaatccaaatttttctggctccaaaccatattcttcactgtagtagtctgttgcctctcaggaaacagtatattatgttgtattagaaagcaggtgtaataccactccataatttagtctgtaaaaataagtaagcattctagataattggaatttaagcattaaaacatttccgtatcactagaggcatctctttttttagttaatttattgttgtcatcatggtgtttccttcaatgaattaccattggagtgtaggattttttgcttgtatacaaaatgactccaatttccatgccctttgcatctcatttttaatgtgttttagttgttcacaaaggcattttctgatactgcctcaagcagtacttcacatttaccttttgatttcctgctttgaatttatgactgttcagaaaaccaaaaatgttattaagatcatagtaagggtaattcaataagctctgatggaaaattgaaggatttattgtcagtatatcgtttttacaaacagctttgtaagcctctgtcaaatggctttgattgccagataaatgacctctatgtaaatatgacattgtatttttttaaattctaacaagcaaatgctaatattactcctataattattcctaattttaaattcattttttattcagcttataaaataaggataaggtacttcataattttcagttaaaaacaactgaattatttaccttagaaataaatrtatttaatttcctcattagtcatcttaattgagctactttctcttaatatttaaataacaaaaaaagccctatgaatgtctttgcatcatgtttttgtcttaactgtgcacctgtttaattctgcctttgtaattcttctctttcactattaggttttaaccaaagaattttatagtctccaagcctcttctgaaaaacgcattactgaacttcaagcacagaactcagagcatcaagcaaggctagacatttatgagaaactggaaaaagagcttgatgaaataataatgcaaactgcagaaagtaagtcttcccccacacacacatgcacaacttttttttttctggcaacaaaagacgcctgaccttatttctaaaactactttgggatcaggcacggtggctcatgcctgtaatcttagcactttgggcggccaaggtgggcaaatcacttgaggtcaggagttcgagaccagcctggccaacgtgacaaaaccccatctctactaaaaatacaaaaaaaaattacccaggagtgatactggggaatcccagctactccagaggctgaggcaggagaattgcttgaacccggaaggcagaggtcgcgttgagccgaaatcatgccactgtactccagctcaggcaacagagtaatactgtctcaaaaaaaaaagaaaagaaaaaaataaaactacttcggtatattttcttaaaatataattggtgactatttctaaataaaattctgtatttcaaatatttgttcatcttcatcttagaaattgcagtcaaaaaagaaacaggttaaatatgatagcttttatctgttcaattttttatcaaattcacttactccagaattgttaagtatttacatctgtcaggaactggggattaggagttcatggaaataattcccgtctcaaggggtttctaatctactgagagaggtgaacataataacaaataattagagtagcaagataaatgctataagcaaaaaatatgcagttctcagtggaaatacaaaagagatcattaattaatcccacctttaaaggaggtgaggcatatctaagagaggagatgacactgcaattagtcttttcttttttcttttttttttttttgagacggagtttcactcttgttgcccaggctggattgcaacggtgtgatctcagctcacctcaacctctgcctcccggtttcaagcgattcttctgcctcagcctccgggtagctgggattacaggcatgcgccaccacacccagctcattttgtatttttagtagagacagggtttctccatgttggttaggcggtctcaaactcccgacctcaggtgatctgcccgcctcgacctcccaaaatgctgggattacagacgtgagccactgtgcccagccttggaatgagtcttgaagtacaaataaaaattcatttgagggtactgtgttataatctttgatctttaatttctgttttccttttttcttgttttcccctcttgttatcttcctgtcttatccctaacgttaataawtattttaaattaacatttcaccrttggctgtgatgtttgctacagtacattatttgtgttcaaaagtcagataaccatggcattcttataaaaatgggtttaaacttcagttgaagttgaatttgaatctaggtagggttctaattattttaggcacatttttgcataaggactgtatttacttgtaggccaaatgtaagaaaaacttatttctttcctatcattgtcctatttcccatttccaaggtcaatgtctgataactgcaatagattttaaatttatcttcaatttcttcactggagtcaaagtaatctttgtaacattcaaattttcatatcatatgctggctttaatgacttttattgtcttcattaagacaataaagtcaaatttctttacatgacttcatgattagactcatgtttatctttctgctttcatatcttgccattcccctccatatcatattattgttttgaaagtttcatactctttcttacctccgtaactttgcatatttccctttgtctaaacaaattaggaatagaagggaacttcctcgatctgaaaaagggcatttataaaaaccaacagctaaaattgtacttaatggtgaaatattgaatactttccccattgagggggagagtaaaacagggtttcctattttcatgatttatatgacatattaagtgctgtatttgaattcctaacctgtgagataaggataagagaagatatatataaaaatcagaaaggaatagtaagaatctattttcagattaccaaacaactactaaacctgataagtgaatatagcagaatatatagtcattacccaaaaatatactagaagtaaacaattggagaagtaagtagcaacaaaaaacacaaaatacttaggaataaatttaagccaaaaaaccctacagatcattgctaagagaaattaaagaaccactccccccaaaatcacgaaatatattgtgaattctatcaattcagtgttcttctagtcacagtggcaggaggcttttttgtatttcattcatatggagtgcagaggactggaatatccaaagcaatcttgaaaaaagttgaagccctgtgtggtggtgcactcctgcagtcccagctacctaggaggctgaggcaggaggattgcttgagcttagaggttaaagcctgtagggtgcgatgatcatgcctgtgaatacccactgcactccagcctgggcaacatagcgtgacctcctctcctccacaaaaaaaagaacaaattggaagaattgcactacctgttttcaagatttactataaagcttcaatatcaggataatacagtactggcttaaggaaagacaaatacagcaatgaaacagactagaaaacccagaaacagatccatacttaaataataatttcatttttaacaaaggcagcaaagcaaacaaatggagaaaggaaagtttgttcaataaatggtgctaaaaaaaattggacatctttatggaagtaaacttccatacaccaatattaatctgagacgatacctaaatggaatagctaaaactataaatatgtaacagaaaacataggtgagttatctttacaacgtggagtacattaagactttttttgacatggcccttgaatgtaattatcataaaagaaaaactgataaagtagatgtcatcaaaatttaaaacttctgttcttcaaaagacaccattaagaaatgaatagccaagccacagactcaaagaaaataaccacaattttatatctgacaaaagaatgatacccaaaataagaaaatattgaggagaaaatattcacaaaacatagattaaacaaaagaaaatgatacccaaatgtggtgggctgaaaaacatccttctagagatgtccatgtcctgttgggcatagtgactcatgcctgtaattccaacactttgggaggctgaggcaggtggatcacttgagctcaggagttcaagattagcctgacatggtgagaccccatctctagaaaaaaagagaaagagagaaggaaagaaaggaagggaagaaggaaggaaggaaagaaagagaaaggaaaaggaaggaaggaaagaaaagagaaaagaaaagaaagatgtccatgtcctcatctttggaacctctgaaaaagctggaaaaggcaaggaaacagatttcaccatagagccttcacacagaaccagccctacaaagcattgacttcaggtcagtgaggctgatttttggacttactacctgtagagctataaaataataaatttgtattgtttaaaccataaagtctggcaatctgttaacgttagcagtaggaaattaatgtaccagaatatatatttaaaaattcatgtaactcagtgattaaaaaaaaaatagtcctgtttaaaacatgggcaaaaggtttaaacacttcacaaaggaagacatgtgaatgacaagtaagcataataaaagtattcaacattactagtcatgagggaaaagcagattaaaagcccagtgagataccactgtatacccacaagaatggctgaaattagaaagactgactataccaaatgttggtgagaagtggagcaactggcagtttcttacaaaataattaaacaacctaatcagtgatccagcatttccgttacttacccaagagagaagaaagcatatgcaccttaaaagatttcctctagaatgttcataggaaatgtattcataatagtcaaaaactgacaacagcccaggtgtgtatctcaaaggaaaatggttaatcaaaccattatacattcatgtagtagaatacttctcctcactggaaggaaacaattgacttacttaacaacatggatgaatctgaaaaacataaagtgtactttatataatatagtatgattatactgtatgattatagtatgtggtatgattatactatatgattatagtatatggtatgattatactatatgattatagtatatagtatgattatactgtatgattatagtatatagtatgattatactatatgattatataaagttctagaagagacagaagtaatctatgatgaaaaaaatcaaggggtgggggtaaaaatttttttttttgtttttaaaaagacaaaaatcagaactgtagttgtctctaaagatgattgtcaccaaaaattaactgagaaaagtgacatggaactttccagggtattcagatgttctatatatcttgatagggtttgtgttaaacacatgtctgtacatttcaaaacttttacatttcaaaactcgttgaatggtagacttaaaaaataaaaataaaatttatacatggtgaaagttacaaatcttattttttagaaaataactgtaaatacatattgaattataattgatgatttgcatgttaaactgttgaggagtgaagtgtgcaaatgtccacaactttctttgaaatgcatcaaaaaaacattcatggaaacgggtggatatatgtataataaacacatagtatgtttgatttagaatccagatgttggagccaggcacagtggctcatgcctttaaccccagcattttgggagaccaaggcaggacgattgcttgagcccagaagttcaaggccagccggggcaacctggcaagaccatctctacaaaaaaataaaaaatgaaccaggcatggtggtgccagctacatgggagggtgaggtgggatgatcgcctgagccctgaacgtcaaggctgcagtgactgtgttcacgccactgcactccagtctgggtgacagaatgagactctgtctcaaaaaaaaaaaaaattgcagatgttgagtatatggatgtatactgtacattttttcagtgtgtccacatgtataaatattttcttaaaagctgcagaaaaatagaaattaatttttgttatgatactatctaaaccaacttcaaataaaatagatttacctgtactagaagatcagtaactaggttctctatcagttcacattggaaattaaaatataccttgtccttatttaatgaatacttatcgattaactaaaatttcaaagaagtgagcacagactttttttagtactacattgtgtacaattttcaaaggcttgccatttaattcaggtaatttcggctgacttttttcaacagactatttttagtactacattgtatacaattttcaaaggcttgccatttaattcgggtaattttagccgacatgaaggtgattagccttcatttattaaggtgtaaccatagcaaattaaagtatcttatttatacttgtattgctttctgtaatcaaataagtattatttggatatttgagtttagttttcaaagatttcatcaagttgttaaaagtataagtattgtctaaaagctaaataaactcatattagaaaaaaaaaacaacctagatttctagttgttaaattcagttacctgccacacatcctcatcatacttataaccttcactaggcatttgtcgaatttctcagaactcccttctctttgcttcttgaatcacctgcctttgtttattttccatcacttaacttctggataatcttttccctttccgcaacttcagttactatcaataggctagtaatttctatagttagacacagggtctcactgtgttgcccaggctggagtgcagtggtacaatcatagctcactgcagtctcaaactcctgggctcaagtgattccccctgcctcatcctcccaagtagctgagactacagacacatgccatcatgcccaactaattattttttgtagagacacggtctcactatgttgcctagagtgatctcaaactcctggcctcaagggatccccctgcctgggcctcccaaaacgctgggattataggcataagccaccatgcacagctgaaaatttaacattatttgcatttcctctttcttccctgaaacttcctaatttttctgtacagttgctctctctattagcagatactgcatctcagatttaatcacctgtggattgaaaatattggggaaaagacaataataaaaaataatacattttwaaaaatacaatataacaactattatatatagcatgtacattgtgttaggtattgtaagtgatgcagacatggtttaaagtgtatgtgaaggtgtagatatgttatatgcagatatatatatatataccattttatataagggacttaatcctgtggattaaaacttcacataccttacaagtctatgcttctgcacatggacttctctcctattccttcactgaatctcagtctccccatatctaccctataccttgtagcatgggaaatagtggcactcagatgcakttgccctgcgctctgcttctaagacacattgttcagatctctttaatagcattgttcagatccctttagtagcattgaccaagttgtataatacattgtttctgtaattaatccctgctagaatagttatcccatgatttattaatccattaagtattaaactcacatttagcatgtccattaatatctaacttatgggtttttgagatgtgaactaaatttacccctctctcctctgaatttagaactattaaggagaaacaagagtcagttacatatctaaatgttagctctagttccagtagagcttatttggagaactcatcttggatctggacttacctgctagctgatcatagtattggtaatggcatgtatcatctcttccatgtgtctctctcaactaataattcttcctcagaaagctaatcctgattcaccatgaaagatagggacaaaattaaaagaaaacagttaataaatgtttctaaaatctttactacagaagggccaatcaacaaatgtatccctattacattgataggcatgcagaagatgaaacatcatgatggttgtaaaatatgtggctttgttttaattctgaaatattcctgaaagtgaatatctttttaacattaaaataatggctggtgataaataatattatgaaagtttttatatgtcaatgactgcttttacttgagctattaaaactatagcctttgatgaaatactttttttggtgttttgggggttttttttgatgatgaaatgttttttggccaggtgcggtggctcacacgtgtaatcccagcactttgggaggctgaggcaggcagatcacctgaggttgggagtttgagaccagcctggccaacatggcgaaaccctgtctctactaaaaatacaaaaaaaattagccgggcttggtggtgggcacctgcaatcccagctactggggaggctgaggcaggagaatcgcttgaacctgggaggcagaggtcgctgtgagcagagatcacgccattacactccagcctgggcaacaagagcgaaactccatctcaaaaaatatatatatatatatatatttttttaatcccaacttgcagtaaaatgtcattgcatttcaagttttttacccagaagatgttaacctgttagttaaaattccttttgggaagtagtgtgacaatagcagaatttaaaagtaaattattttcacataatttttttacatttaaaaaaagtaaggccatcaatacatgcttagagctgcacagtttttaatagagtaacctacataagtacataattttattgttgcaaattaaaataaagttgttctgataaaataatatttgtcctaatttaaaaatcatttatcaagaacagaattgatgactttgatatgttatcattatttgttatattacatagcatatttcatgcaaaaagcctttgagtccttcagaataatacatgtattattatactttttaacaagaaaacctaacatgatatgatgcaatcccttatacatttcaaaaataaatggagcaaattcaagcaaggatatactttaagaaatatgtttctacttacaaatgggctgtttaagattacatattagccctttctaatgyttttatcctccctaatttgttataacctcctttattttcacttctgccatcttttttaaaggaaaaataaagttatttcacattatacactttaatattttccagttgaaaatgaagatgaggctgaaagggttcttttttcctacggctatggtgctaatgttcccacaacagccaaaagacgactaaagcaaaggtaaaatcaatatatatttattttatttatctactcaagatgaatgtaattacatttgtgctttctgataatgtgctgagttcagtgacaaagtcctttattcttactctgcataaatattaaatttctcacaaaataaaacactaataatcatgtatttcatatatatttaaataaatttagtggtttgtagaagtgtgcataagaatttctgtagaattagattcgatgataaggaccttgtttttattttcacattaatttcagatgagctacaaatgctttgtatcaagaatattcagattaaaattcattgtgctttttttttttctttctctcatttttattcaactgcctacattccttcacatacatgttagggagagtgatttggaattaatgcatatattgtaattgaaactatgaaaggctttacaaaaccaagagaatatttagaagacccactagttatcttgtgagataatgtttaaaagtacagtcagccctctatatccatgggtttcacatgtgtgaattcaaccaaccgcttatcaaaaatattcgcgaaaagaatggatgattgcatctatgctgagtatgtgccgactttttttcttgtcattattccttaatacagttattcacatagcatttacattttgttaggtattataagtaatctagagatgatttaaagtatatgggaggatatgcgtaggttgtatgcaaatattataccaattgtatgtaagggacttgagcactcatggattttggtatccacaggaggtggagaatgtacactggaaccatgcatcccgtggataccaacagacaactgtaygctaacagaaaattatacctacattaatcaggtttccagttgacctgcctgatttttattcctaactcctctcttgcacgaaaatttatcctgctttgcaaaaacatctcacggccccattcactaccacatcaaatccatcaaatctaaatgtttctttcagacttccacgcgcctctataatgtagctctatctctccagccttatttgcctctctacccaaagtgcagtggatatacctatttctctgcctataaagcaactgttttctctgtaccacacagcagagcatttctcttatctcattagctatcatttcctgtgtaatttacccatctagatggaaagttcttcgaggtcagcaactacctatttttttttttttttttttgagatggagtctcattctgtcacccaggcctggagtgcaatggcacagtctcagctcactgcaacctccaccttccaggttcaagcagttctcctgcctcagtctcccaagtagctgggactacaggcgtgcaccaccacaccctgctaatttttgtatttttagtagagatggggtttcaccatgttggtcaggctggtcttgaactcctggccttggcctcaagtgatccacctgcctcggccttccaaagtgctggaaacacaggagagatccaccatgcccagtctagcaactacatctttttttttttttttgagacagagactcactgtgtcacccaggctagaggcagtggcacgatctcagctcactgcaacctccacctcccaggttcaagcaattctcctgtctcagcctcccgagtagctgggattacaggcatgtgccaccatgcctggctaatttttgtatttttaatagcgacagggtttcactgtattggccaggctggtctcaaactcctgacctcaagtgatccacccacctcggcctcccaaagtgctgggattacaggcatgagctaccacgccgtgccaactacatcttattcttgtttatttttcactttctctatctaactcagtgcaggatacctagtaaaattgtttcttcatcagagcgtttgagaattcagagttgcttttttttatgtgaactgatttagacatttagagacattgtacactaagaaaatgactcagaaaatagaacatctatatggctatctaaaatgatgtatcctcattaatatagtggtgaataaaaaaataaagtgatgtagaatatagagcactttatagaaagcaagaaaaggatgcttagaacttatggctcttaccagttaaactaaatatatgccaaattttgatcaaggcgagctgaatagaaagtatatatttgtagctggaatgtttaattctgtctggtgaggattcagatatttcagaattatgtatttttaaaaaatcagtcccattcccatttcctctaaaagtcacaatgggtaacctaggatattttgtaattttcagcatatctgtttcttagtccaatgttgcctaaggaagaatagaacatagttttgtgggtaagagacttatcagtagtaaatgataggtaaaatactaaaacttgaaatttaaagggaaaggtcatattcttttctctattttggcctctgaatccttcaaaagaatctttgttacaagaaaaaatagggctgggtgcagtgactcacacctgtattcccaacactttgagaggccaatgcaggcaaattgcttgagtccaggagtttgagaacagcctgggcaacatggcaaaaccccatctctacaaaaaatacaaaaacttagctgggcatggggacatctgcctgtagtcccagctaccctgctcaggaggctgaggtgggaggattacctgagctcaagaggtcgaggcagcagtgaaccgtgattgtccacttackcttcagcctgggtgacagagtaagactctgtctccaaaaaaagaaaaacagaaaagaaagaattctgctgttagaactttgcttttcttagccccaaatgctgagttcttcagaatcacaaacaattattgctgttgcacattactatttttttaagaatttttaaaaatagaggttggtttttaatatttaaagtgaggatttaaggaaccacaactgattcatactcgaaataatgttaactgtccaaatattctaaagattctatcactgagctatctatgtgccttgaacatgtgcctaatgggcatgctattaatatctcctgccagctggtgccaggcattcttctcatggtgagccagagggttattttgaggaagtgcttctcaggtcatctaagctgaatgacgggaaagtaaggctagatatccaaagagaacatttatgcattccttcatgcattcaacaacttttattgagtgcttactgtatgcacaaaattgatcartggcactaaakatcccaggttagggtctgatacatttctgaagtttgcaaagtccacatttgagttcataatggatatttgtaaagaaagcggtggctttgcgctctttttatgtttatttaagataaaagcagtataacctttgagagaattatatgtaatccttcacatttgaaattaaaggattggagccagacgcactggcatgtacctgtaatcccagcttctggggagcctgaggcagaaggatcacttgagaccagcagtttgaagctgtagtacactataattgcacctgtgactagtcactgcactccagtctgggcaacatagwcagactcccatctctcaaaaaaagaaaagaaaaaaaaaatcagtggaaacttaaggcgaatgataaaacaactcagtcaaaacagtaaatgaactatatgcaaaataaagttttcattgtacatcagcctataccaaaatatattaaagtttcaaaggaacctattttccaactactacacaatagattccattcatattaaatttgatttaaaatcttatatgttcaacaaccagaattagatattttagggtaacatttaattggaaggagatttctgatttgttataacagtaatgtttattttattttatttttatttttattttttggagttggagtctcactcactctgtcacccaggctggagtgcagtggcatgatctcggctcactataacctctgcctctcaggttcaagcaattctcctgcctcagcctcccaagtagctgggactacaggtgcatgccaccacgcctggctaattgtttgtattttagtagagacagggtttcaccatattgtccaggctggtctcgagtgatctcaaactcctaagctcaggcaatctgcccaccacggcctcccaaactacaaggattacaggcatgagccaccacaccaagccatgtttatttcataaaattggaaaattactggtaatcctaccatccaaaataaccactcggaaatgtatacagatatatatatatactttcttatttaagatattattgcttgtaatttaatagtttaatttattgtcatagaattccattgtaaacattttcttatgtcattggatattcttcagaaaggtcatttttaatggttatccaaaacgttaatttttagtacttccatttttgagtgctatattttcattacttaattgtatagttactgaaaaatatcattagttgcctattgcaacccaggcaataccacaaaattaaaatgagaaaatggatgtgaagttcctgacatagagtagatctttagtaagtgctaggtcgttacaccttgatgtgtttgttcttaaagtaaattacatagttaattttagaggaaaagccagggttctgaaatcttttactaggcacaatttgagttttcatttaagacgatattgttttaaaattatacagaagcctcttgaaataattagcagggatacccccsaaacatgaaactttctttagtatcagtccatttttaagagtctcactctgttactcaggtcggaatgcagtggcaccatcatagttcactctcatctcaaactcctgggctgaagtgatcctcctttctatcttcctgagtagctaggcatgcacgctgtacctggctaatttttttattttttatttttttgtagagacagggtcttgctgtgttgcccaggctggtctggagctcctggcctcaagcaatcatcccacctcagcctcccaaagtcctggaattataggcatgagtcaccacacccagcctattttttaaaactctttctgggacacaattatagaaagttacaagggcttatacaattaaagtagattaaaataaaatgggctctccttgactaaacttgaaaatctgaagtaatgttttcctttcagttgtgattgttttgaaaatagcaaacatgattttctagttacatgttttggttaagccctttaacctgccacactaaatggtgacacccaggcactaacatggtctttgtatatgcctctgtgtttgttttggctaatctgaatgtggagactgttctgacgttcttaaacctttcaaattgtgagattactgcgtactatagtttctctcgttttataaaaagctttaagttaaaactttcagtttactgaacttcataataaaaaaaaataaagcagaggaaactagcaaaattttgtgtatgacaaacatgttttcctttcctttattctcatatatatgagttctcatttttgtccttggggaaacttgtactcatttcatttgggatggctttaggaatagttctttaaaaagttgctgcttttctattcatgataaatttggaagtgtaagcctatagaagaaactagcgacagtctcatgtaactacagataatcagcatgagatcactgtttagtccttagtcatttccagctgagtagatagtataaggaccagccttaagctttttgaaagtgggatccttctggcacatgtccccttctttgcaaccatctttgatgccatgctagtagagacaggactctgatctactgaaaactgagaaagatcaaataactaatatagctaataagcatgcctcacatattcttgctcatttcgagttttggtaatagtaagacaccgtaccaatactgaagaacccagaacagagcgtcaatcctccattgtgctttgatatctcagatataaacaaaactctgtcatgtccacatttgctaggctaaaaatgttaggaaattgtatgtagtaatcagaaatacagactgccatggacagagccaaaaccaataacctgtatttggcatcaagaagtgctaagagagctaaaagataacccttggaggaatactaatttgaccaagtaacaggtgaaattttggtttaatatttaggtgtacaaccaatatactggtggtggtagtttctagctgatatcaaacttaatcttggtataagtgaaaatcatttaagcaattaatgtattaattacaaagaagtattgtatctatttaagtgtcccaatagatagcttataaaaagcattgctttcttgagaaattcagtacattctacaccaaaaataacatttagcaagagtcatttttcctgaccatgtttatagttattcttcttgaagatcttagcagggccaggcacggtggctcacgcctataatcccagcactttgggatgctgaggcaggtgaatcacctgaggtcaggagttcgagactagcctggccaacatggcaaaaccccacctctactaaaaagacaaaaattagttggcatagtggtgggcgcctgtaatcycagctgttccagagactgaggcaggagaattgcttgaacctgggaggcagaggttgcagtcagcccaggtcacgccattgcactccagcttgggcgacaagagcgaaactctaactcaaaaaaaaatttttttaaataaagatcttaggacttgttttcattgtatgtttattgtgttaaggaggcataaactcagctgtagttgagcagttcttcatttgtcttgttttgaatttcatttaaacactcttctttcttcccacttgtaagatcccagacttctaaagaggatccacctatagcaccaaatcactcaccaaagcaatatgcccacttaaagttttaggaggttgaatatagaagtggtgaattggtatctaagacatttgccttcttctttgtgcactttttaattgctagttcaatgcttaatactgagcattagttgtactttattttttttctttaattgcccattattggcaataggtgtaccttaatgttgaggtgctgcaacttcggagtatggtttctaacagtgtgttcatttgaacaaaatgcacttcaacaagatcagtccagaggtacttatcgctatgcacatgtctcacgcctataatcccagcactgtaggaggctgaggtggaaggatcacctgagcccaggagtttgagactagcctgggtaacaatgtgaaacacagcctctacaaaaattttaaaaatgagccaatcaycctaatgcacctgtggtcccagctatgtgggaggatgagctgggtcacttgagcgcaggaggtcaagactgcagtagccatgtttgcaccattgcacttcctggcctgggcaatagagtgagaccctgccagaaaaaaaaaaaagaagatttattaagtacctactctgataagctctacagttagataccacaggggataagactcctgtcattttatgagttrcatctgtttagggagaaatgattaacatacatgaaagaatatataaactttagtactatatcatatgttgggttaggctatgtcagtcagaggaatagagatccgtgaaggctggcacagtcaaaaatggaggaagtggaactcgacgggagcctttaaagaaaatcttcagactggaggaccaagaaaaggcagtggaaggaatacagaaaacatatttgtgagacgttaagtagagtagacatgaagggcaaataaggttagttccagtgagattatagagggtcttgatatttttaaataatttagagatagagtaaaactaaccatgaaggtcagatttgaaagtgagtgggaacaggatatagacatcagttcactatgtaagaaatacagatgtctgacaaacatgaaacaatgcttaatctcacaaataaatttaatttaaaacaggattttatgtttatctataaggttagcaaaacttccaaagattgacaatgctcagtattggttgggttatgaagaaacaggagatatgaatgaacaggaattcattcattcaatagataatttctaagtacctcctttgtaccaggtatttattgttgaactgtaacaggtttttatattttctggattcaagtctcttaactgatatgtgataagaaattttttcttccattctgcagattgtcttttcactgtttttttccttttttctttctctctcttttttttttttttttttttgagacggagtctctgttgcccaggctggagtgcagtggtggaatctcagctcactgcaagctccgcctcccgggttcaagtgattctcctgcctcagcctcctaagtagctgggattacaggcgcctgccaccacacccagctaatttttgtatttttaggagagacggggtttcaccatgttggccaggctggtctcgaactcctgacctcaagtgatctgcccacctcagcctcccaaagtgctgggattataggcatgagccaccgcacccggccctgtttttctttttcatgacaaaactgaaatggttaaaatctttttactttcttaatggtgcattttgaagcccagaattttaaaattttgatgcagtccagtttatccaattttttttgttacttatgcttttgctgccctgagaatcttttgctaaatctaattttgtgaggatttactcatatgttttcttctaaaagtttatagttttagcttctgtatttaggtctttgatccattctaattaattttttggtatcatatgargtaagggctttgtactgtttattaatgtggctactagaaaattttaaattgcatatgtggcttgcattatatttccattggacaaagctgacctagaccagtggtctccaaactttttgatacgaatttttattgggaaaaaatttgagtacacactcagcaatatatgcatatgtattcatatttatttatagattatgtaygcatgtgctatcatatgaatagtatgcacataatgatataaaacctacacagcaaatgaaaacttaagataatttaacattaaaataaatgtaagtaaaagttcccacagttcaagaaataattttgcacataactacttttaaagaccactggtctagattatgatcataaccttctaaatgactgtagtcttcttccttctgcaggccatcctgcacactactgatagagcactctttctaaagtgcgggccagatcgtgttatgtctaaccaacttcaggataaaatccaaacatacaaggcttttcataaaatatctctgcctatatctctctagcttcaaccctcaccatgcaccatatattattgatctatactctactacttagaattttccctagcacttcatcctctacataggcatttccctctacctaaaatgctgtttctctgcttcttcaccagattagttagtatagtttttattccttagtggtatgccttttcttagcatttagcatactacagtaatttttaaatttgcctgtcttcctcagtagactattagatcttcccagtagatattatgtattctcagtgcctatgcagattataggtttttaatacatgtttcttcaaaggaagtgttcatgaatatttttcgaatgaattaatgagtgtgtttcttctaattcaccctgcttttctgcagtcattgatattcatcaccaagaaaaaatagtaatttcctttttttttttttttgaaacagagtctcactcagttgcctaggctgtagtgcagtggcacgatcttggctcactgcttactgcaacctctgcctcccgggttcaatagattgttgtgcctcagcgttccaagtagctgggattaaagatgtgtgccactgtccgggcgtggtggctcacgcctgtaatcccagcactatgggaggccgaggtgggcggatcacgaggtcaggagatcgagaccatctggctaacatggtgaaaccctgtctctactaaaagtacaaaaaattagccgggcctagtggcgggcacctgtggtcccagctactgaggaggctgagacaggagaatggcgcgaacccgggaggcggaacttgcagtgagccgagatcgcgtcactgcactccagcctggtgacagagcaagactccaactcaaaaataaaaattaaaataaaaaaaagatgtgtgccaccacacccagataattttcgtgtttttagtagaggtggggttttgccatgttggccaggctggtctcaaactcctggcctcaagtgatctgcctgccttggcctaatttttttttactgtttttgttttactgtaagtattataatgatgaaaaacagttatatttcttgtttctgctgtgttcttttgcttaaatatatctttatatttcttttcattaaatcttaatataatctcttatatccttaataatacaatcttaataaatctgagtataatcttttaatgaaagattttatattatcttttgttcttttctgtgtatgtgtgtttgtactacattagtgggctaaatgggtcttttagggcaactgagaactttaataccatttctaatatatgtgtgtwtatatatatatatatacatatatatatatacatatatatatatacacacatatatatacacatatmtatatacatatatatacatatatatatatatatacatatatatatgaggaaatgtgttttactgttcttacaactgacttagaggtgagtttttaaaatgtgaaccccatatatactggagaccaattgtaccatgttgtcttctacattattatcattatgcatcataaatgacatcaacagtcatactaatactcacggtccttcccgtcaccatcaattctcagaaagtttttctcagtaaaattgtactataaactagtaatcaaagcactgtagagtatatttgtaagcaatttgaagataccttagatacyttccttctatttagagttgattttccttacttggaatctcccagtcaaaatcagggaaattcctttttgaagaaagtagtcctggtgttaaggcttaagcactagcataccaagaatttcttttttttgagatgaagtcttgctcttgtcccccaggctggagtgtgatggcaccatctcagctcattgcaacctccgcctcccaggttcaagcgattctcctgcctcagcctcctcagttgctgggattacaggcgcctgccaccacgcccagctaatttttgtatttttagtagagacagggtttcaccatgttggccaggctggtcttgaactcctgacctcaggtgatctgcctgcctcagtctcccaaagtgctgggattataggcgtgagccacctcacccggcaagaatttcttgagtcagtgttttatgacttatgatatttttattggtaagtggtatcaccctatctgtataagaacattatagaattcccaaacaaaataaaagcactcaaaccaaatgaacaatttaatattattaaacttgatgtcttcaagtcattatcttgttcagattgttggtaatatgtgacctctgcatctcattttcttgcatgtctttgtcttccatttcattcatttgtaactctagttctgtgtaattgcatttgattgtgtttattgttctatactgagtatacacatacttgttctacaccttcaacatatttattgaaaaattaccatgtttaagtgaccctagtgtgaagttctgtgggacacaaaaagataaaaaaaagttaacacctaacatgtatgaagagtaagaaagcaagaataaaaatgtgaataaagatagctccaagattttttaattaacctaataaaaatagagctaatgataaactgatgcttgcaaacgtataatggaatcaacggattttaaatgcaaaattcacattaaggcttattttatttgtagaaatcttgttattttagggtcaaattagagagaacttagtatatttttattgggaaatgaagaacaatatagtcataaactgtaaactccttaaaaatttataaagagagaaagattaatggttccctaaggttgaatttgaggagcaaaggaggaagttggaatgtggggaggatggagagtgactggtaatggacacagaaattcttcttgagataatgaaaatgctctaaaattagattatagtgatagtggcacaactctaaatatactaaaaatcattgaattgtacactttaaattggtggactttatgatatttaagttgcatatcagtaaaattgtatgtcagtaaagtttaaaaaaaaagtggttgtcaaaaaatgaggactatatgctttttccatctctaatgccagttgaaagaattttagatctaaacaagcaactcaaatcactttataaacttttgccagaactcatcttttttatttggtatgagttcttagaaatagatatatagaatgatatttaacactatttattattattattatttttagagacagggtctctgtgtcaccccaggctggattgcagtggcacaatcctagctcactgtaacctcgaactcctgggctcacgtgatccccccatctcagcctcccaagtagctggaaccacaggcatgcaccatcatgcccagctaatttttgtattttttgcagaggcagggtctcaccctgttgcccatactggtcttgaattcctggcctcaagtgatcctcctgcctcagcctcccagagtgctggggttgcaggcatgagccaccgcgcctggccttaacattattttttagaatgttgtctgcatttctttatctgatattgggaaatattaaaatacaatagaattttttctgccctatgattttatttaaagcacagttatcttactttttgtcattataaaacattccatctaggattccatggattctgcaattcacagattaataggttaactagtataaaatatgaaaatatgataaatatgaaaatgttaagttactggaaatgcagagaggttctttggagcaatatgtcttctcaaaattattagcagttctttaaagaaatataccacttcctcccaccatagttagaaggaatagattttattcttaaaattgtttcttaaaagtagaattgagatgtttcatatgtaattttaaatactaaaggtcagtgcaataagttatggtaatgcagagcatcagagggagtgatttttttcttttagtacagaagcttagcctttactatagacattctctaagttttatatatctttttcatctccactttcaattaaaaacctcatttttgttttatattataacatgcattatgttgtttaaagtaaactctgatacttctcaaagtgataagctaattattgtttgtaatatttcaactaattttctgatttgtaattggaaaatatttataaaagtggagacaagctgtaaattgctgtattgtggtcttttcaagcaagtgttataatgttacctctccacttttatagcaagggctaaaaaccgttactgcagtaatcagtctatcacggttatgttttaatgttgttactctcataattctgagttgtggggtattggtcttccactactggtgcctgaaaatattatttgactctatrttttttctgttaatatttaagtataattaggaaatgatgtctattttcaagtacacaaacacattttgaatattttgggcagtatttcacttttaagcattaattttcttatttcatttgcctagtgttcacttggcaagaagagtgcttcaattagaaaaacaaaactcgctgattttaaaagatctggaacatcgaaaggaccaagtaacacagctttcacaagaggtaaataacttaaagaaacccatatgaagaatcacagtattcattttaattgtttgtaactcttttatttttctaagcagttttaaaataagctgtttgctagtacaaaatgatttcacaatttatgaaactaactgaatgttaaggccataaaaaacaacttacagtgtatggcaaaactgagaacaaaagggagattaaatgcccagactaagtataaatgcagactagacagacagagctttgatttctgagaatatcaactggtaaaacaggtttggcaaactttggtgacattttaagttttttactaatcatttttaagatagatttggtttttacctctgtgtttaatgagaaatcactcctctgttaaatttaactttgtttacacttagaaaatcaggctcatattgcttctttttcttagccttatgtcatttaaactacgtatatatatatatatatatatatatgtatgcattttacatagcatttttaatcatcttctgatgtcaagatctaattttatttttctgtacttttgaaatgcgagtcataaaacaatttaaaccggaggtactactttgctaatgttccttttatttatttatttaatattcctgagtgtcaacataagaagtttttccgtttttttctttgtttctttctttttttttttttttttttctgagacagggtctggctttatcgcccagactggagtgcagtggcatgatcacagttcattgcaacctctgcctcccagggtcaaggactcctccctcctcagcctcccaagtagctggaactgtagctacgcactactgtgcctggctaatttttgtatttttttggtagagacagggtttcaccatgttgcccaggctagtctagaacttctgggctcaagcgatccacctgcctagggcctctgaaagtactgggattggagatgtgccactgcacccagccaagaagttaatattttaaaagttttaaaaactatttctcttataacaaagggttttttcaagtcatacattaaataacattaatatatgttgtttattatttgttttcttaaggatctgtttatattctttagagtgtcttttcatactataacattaggaggatctttatcctcaaatttcgaaagaccagaaatacttcattttattgcagttcctgacacatagttaatgcttggggttgacacagtggtgtgttggtaaatgttaacagccagctttccaagagggatatgagggagagcttgatttgtaacattggcttgtatctcttttataaatactcccaccatggctgacttcaaactaccaacctaaggttactgaagatggagtaaagattgtcagcagcataccagtacttaatgtttgcaccatacagatacaacagacataggtaaactcaagagcacagataatagtaaaataattttaaattgacaaatttgattgtttttacctttgtttttaataaaatgtattttactataaatttaaataatttagtttagtttttaatgctagttgtgtttgatagccagcccacaaaattcctaaaaattttcaggattcatttgtacttcattcttttcattgctgagtaatttctttgtgtggatgtaccagtttgtttatccatttacttgttgatggacattggagtcatttccagtttttggaataaagctcatatgaacattcatgtacaagtctttgtatgaaataatagagaactcctacaagctgctgcaagccaagtccagcacactgctaggtggaagcagaaaagataaataaataaacaaacaaacaaacctctgtttgctaatatattgtagatccctcatgttgcctttaatttcacagtaattttcaaaaatattttttaaaagtaaaatattaaaatacatgccttcctgagcatttcagttaattgaaataagaatttctaaatgtgggctggatgcagtggctcatgcctattatcccagcactttcggaggccaaggcaggagagtcacatgagctgaggagtttgagccttggctacaaagcaagatccaccatctctaaaaataaagaagccgggtgcactggctcatgcctgtaatcccagcactttgggaagccaaggcagggggatcacttgaggtcaagagttcaagaccagcctggccaacatggtggaaccctgtctctactaaaaatacaaaaattagctgggcatgatggcacatgcctgtaatcccagctacctgggaagctgaggcacgagaatcacttgagcctgggaggcggaggttgcagtgagctgagatcgtrccatcgtactccagcctgggcaacagagggaaactctagtctcaaaaataaaaagaaagaatttctaaatgtgaacacacgtctataaattgttgggagaaaatgtaagaaattaagtgttaaatgctcctataattaagtataattaactttgtatgaaaccatttttaaataagctatggcttatattgagaaaaagacttaaatgctgaaatatttatgatgtgaaatggtatggtgcctggaatttgctttaaaatatttcatgagaaaaggaggaagggcttaacaaataaaacaagaatcacaaaatgttaataatgtttgaagttggatgacgtttacatataggtttagtagtgagttctggacttttgtgtatgtttgaaaaaatttcataagacatttggagaaagaatcagtaaccctatattaaaggatctatgccaacttcagtatataacttttcccttaagattgaaaataaaatatttaaagtattctatggactttacttttttctgctttacaaaaattatattgcttacactgaaaataattatataaactagatgaatgattagtattagattgctgttataacaatagactattcataatagatggtgaaataatacagatggaaattatctcaggatctttattctttattttattttattatttatttatttttgagacagagtctcgctctctcgcccaggctagagtgcagtggtgcattcttggctcactgcaactctgcctcccagtttcaagtgattctcctgcatcagcctcccgagtagctggtattacaggtgcacgccaccacgctgggctaattttttgtatttttagtagagataaggtttcaccatgttggctaggctggttcaggatctctattctttggatcaggttaaatatttaaatcagtttggcctttttgataatacacagatgaaatackgataactaatgttagaattaccattgagttaaacactattcagattatgtctgagattgtacataagtgaactgacaaaatgacaatgctaagtaatacccaaaataaaaacaaatactcccctttttagcagctttattgaagtataattgatatacagtaaattgcacatatttaaggtatagtgcagtttgacatttggcacatgaatatacctatgaaactatcaccaaaatgaaggtaataaacacatatatctccccaaaagtttccatatgcccctttggaattcttgcctcccaaccttccccatctcagtccctaagcaattactgatttactttcagttactgtaggttagttagttagttagtttgtttgtctgtctgtttgtttgtttgtttgtttattgagacagagcctcactctgttgcccaggctggaatgcagttgtgcaatcttggctcaccacaacctctgcctcctgggttcaagcaattctcctgcctcagcctcccaagtagctgggactacagccatgtgccaccattcccggataatttttgtatttttagtagaggcggggtttcactatgttggccaggctggtctcgaactcctgaccttgtgatccacctgtctcagcctctcaaagtgctgggattacaggcgtgagcaagcctagcttgtatttcctagacttttatataagaggaatcatatagtatgtatatgctttttttaatgtctcctttcactctgcataattatttcaagatttatttgtagttcatttttttcattactgagtaacatttcgttgtgtggaagtaccacagtttgtttatccattcacttgttgatggacattggagtcatttccagttttctgaataaagctcagatgaacattcacatacaagtctttgtatggacgtatgctttcatttctcttgggtaaatatctaggagtagactggccggatcatatcgtaggtgtctatttgacatcttaagaaactgctaaactgtttcccagatgtttgtaccattttacatttccaccaataatgtatgaaagttccaatttttctacatccttgccttgatatggttagtttttttatccactataatgggtgtgtagtggcatattagtgtggttttaatttgcatttctctaatgacgaatgattttgaggatcttctcatttgagtttctttgccctctgtttatcttcttgggagaagtgtctcctcacattttttgtctgttttatcaggttgtttgtcctcttattcttgagttttgagtattatttatatatcctaaatacaagtcatttatcagatatatgatttacaaatattttttcccaccctgtggcttatcttttcacctcttaatgatgtctttttatttatttatttatttatttattatttatttttagagacagagtctcactctgttgcccaggttggagcgcagtggtgtaatcatagctcattgcagcctcgaactcttggactcaagagcctcaaactattgggagccttagcctcccaaatactaggactgcagttacctgcaaccacacctggctaattttttttatttttttgtagagatgaggtctcactatgttgctcaggttgtctcgaactcctgggctcaagtgatcttcccaccttggcttcccaaagtgctgggattgcaggtgtgagccatcccacccagccaacaatgtcttttgaagagatgcttttatcaagtacagttcatcactttgttcttttatggattgtgctttggtgttgtattttaaatatctttgcctaacctagggtcataaggggttttgtctatttttaattctagatgtttcatagttttaggtctgtgattcatttttagtttaatttttatactgagtggaagatatagattgaaattgatatgtttgcataattgaaacacaactgttgtagcatcatttgttgagaaacaatcatttatgtgtgagactgttctcgactctctgttccagttatctgtctttatgtcaataccacactatcttgattgctgtagctttataatatctggaaatcagatagtattggtcctccaatgctgttcattttcaaagttgtttagctgggtgttttttttgcatttctatatgaattctatcatcagtttgttaatttttttttcaaaaactagctgtgattttggttgacattacgtaagttgaatatatagatgaagcagagaaaattgacatcttaatattgaatattctgacccatgaacatactgtatctttacccttatttacgtcttctttaatttatcttaatactattattttttagttttcactgtataactaaaaactgtcaastgtttgacatcttttattgtcaaacttttacagtgaaaactactaaaacattagcattagcaaagtgtatgtttttccagccttcttcttttaacccgtctgacaaaatatgattttcaattggagatttttttagaacacttaacatctagtatatttattgatatggttatgttcaagtttttcatcttgctaatgttttctgtttggcccatctactttttattcactttatttttcttgtcttcttttggattaattgaatttttttatttcattttatcttattgttgcttattggctataactttgttatttcagtggttgatttagattatagtgtatatgtatctttaacttatcaccatgtagctccaagtgatatttagtaaaacatatggtataagaaccttacaacagtattcttctatttgttcccccagcctttgtgttcttgttgtcgtacattttatttatacacatataaactcccatactacattactgctattattacttaaacagtgataatcaggctgggcacagtggctcatgcctgtaatcctagcactttgagaggctgagacaggtggatcacctgaggtcagtagtttgaaaccagcctggccaacatggcaaaaccctgtctctactaaaaatacaaaatttagtgtggtagcaggcacctgtaatcccagctactcgggaggctgaggcaggagaatagcttgaacctaggggttcgaggttgcagtgagccgagatcgcgccacttcactccagcctgggcgaaagagtgaaactccatctcaaaaaaaaataaatgaaatgaaataaacagtgataatcttataaagagatataataatatgagggaaatatgttaaatttaaatagttaccataccttgtgctctttattcctttttgtaggcctaaatttcaaactgttatctattccttctggttgatgcacttcctttaacaatttttatagagcaggtctatggtgatgaattctgtttctgtatatagcaaaaagttgctattttgcctatttttagtttttttgtttttacatttctgactatttttgacaaaagtctaggttaaaatgcaattctcacagatatggaataaggccaaattaactgaaagtagccatttaagagtttactttttttattgtggtaaaattcagataacaaaatttaccattttaaccattttaaagtatacgatttagtagctcatggtatgtgtatggtgtttcatacacagcaccactatctagtaaaagagcatttccatcacctgggaaggaaaccctgtacccattaagcagtgactccccattcccgcctccacctcagtcccccacaagcaataatgtgctctctctctctctatggatttgcctgttctggatatgttatataaatgaaatcatgcaatatttggccttttgtgtctggctcctttcacttagcataatgttttcagggttcgtattttgccatctatcagtgctcagttcctttttatgactgaataatattccattttgcagattaactacattttgtttatccatcagttaatggatttttgtctgttttgaatagtgctgctgtgaacatttcatgttcaaattttttgtttgaacacctgttttcaattctcgttaagtggaattcaagatgaaatggtaattctatgattcacttttcaagaaactgcaaaactgtttttcgtagtgactatgccattttacattcccaccagccatttcaggggttccaatttttccacatcctcaccaatgcttatttttcatttttttaactctagccatcctggcaattacaaagtagtatcttctaatgattttgctttgcatttctctaattaggttaataatgttaactatcattttgggttcttattggccatttatatatcttctttagaaagatgtctgttcgagtcatttgcccacttttgaattgggttgtctttctgttgttgagttgtaagagttctttatatattctggacactagacctttatccaatacatgatttgcgaatattttctcccattctgtgtgggttgtctttcctccacttgttagtgtccttcaaggcacaaaagtctttaattttgataaaatctactttatcttaggtgtcttgtgcttcacctttggttttgtgggttttttattgaggtgaaattcacatgacataagattaaccattttaaagtaaaccgtttaatattcattcacagtgttgtacaatcactatctctatctagtcctaaaacatgttcatcaccccagaataaaaccttgtacccattaagcacttaatacccactcctctttgcccccaccctctgacaactgccaaatcactttatttctgtggatttacttcatctggatatgtttcatataaatggaatcatacaatatgtgacgttttgtgtctggtttctttcactgagcatactgtttttgatgttcatccatattgtagcatgtatccagtactttaaccctttttatggccgaataatattctgttgtgtatatttaccttaatttgtttattcatttatcctttgatgaacatttaggttatttccaccttctgactattgtaaaaagcgctgctatgaacacgcaaatacaagcaaatgtatgagtacctgttttcatttcttttaagtgtatacctgggaatggatttgctgggttcacctttgttttttagaaagatattttccctgggtaaggaatttgaggttgacttttctctccctctctctctttttcagtagttgaaagatactgcttcactcccttctagtttgcatcgtttctgccaagatattgccgtcatccttatctttgttcctctctaggtaatgtgtatttctttagctgcttttaagagatttttagtcactggctgtaagcaatttgattatcatttggctttctggagttttcttcatgtttcctatgcttgggttttgttgaacatcttacatatgtgagtttatcaaatttataaatttcttaaatttttaaatacttcaatcctctcaccttcctttgaggacttcaatgagatatatattaggttgcttaaagttattctacaacagaacaaatgatgttctcttcagtttttttcagtcttttttctgcttttcttttgaatagcttcttttactgtgtcttccagttcactaatctttttttcaccactgtataatctgctttcagttcaatccagtttttatctcagatattgtagttttcatttctagaagttcaaattggatcttctttgtgtcttttaggtctctccttaacattctcaaactttattttctggaatatgtgaaatataatttcaataacttttttatattcttgcctactaattctattattttgtcatttcmtggctgccttcaataaatttgaattttctcattatatatcacattgttcagcttctttgcatacgtagtaattatttactggatgccagaccttgtaaattttaccttgatgctatatattttgtattcctatatgtttttgttagctttgttctgggacatagttaggtttcttggaaacagtttgattcttccaaatcttgcttttaagcttttttaggcagagaagggtttatcgtaaggccaatttctcccccattactacaaccaaactctttgagtattccatgtcctgtaaattgtaaggttttctactttggctgatggaaataagcactatgccttgcccatgttcacttcagagattgctcctaccaatcttgtctgtagttctgtctcctgtctttatacatatgcactgttctgtgccaggtaaatacttaaggggcactatctgtaaattgtcagagttctgtctctttgcagctcccttttcttcagtagtctcccatatgaactgtaaccaccttggttattacttctatcaacagctccttaactcagggaatttgacaggctctgccttaattctccttcccagcaccacagcttgaaagctgtctctagtcaataaactaaggcagtcatagagtttaccttgtttgtttcctgtgtgtcagggatctccttcattgcatgatgtccaatgtctttcgaccgttgttttattagttggtccagtataacagagaaaacaagttattcttttttgtgtatttgtgtatacccactaattctcaagaaactgccaagtttagttaagagtcaagtgtcagtgtggagtttgttaaacagtagaaaatccagaatcataaagtgtgccacattactgccaacagtaaggcagctaagaattggtctttcttagctgcctcaaaccttgatatatgctctccttctagttattcagtaaatatttatcaatttcccactatattcaacaactgatgacaaaatagacatggtttttcacttctaacataaccaaccttattcacaaaggccttattttctactgtaagcacgcagagatttatcttttacaactgacttaatttcaggaagcttgtctagaaagtgggacatgcacagtcatcagtaaccacatggcaaggtttagctacctggaattttgtacctagaaggcattgctagatttgaaagaggcgtcaaggtgcataggtaaaataaagtagacctatatgtattaactttgaaagaaatttatactgtattgatgatttttcaaaaaacaaattgcagaataatttctgtttctctgtttgggttttaatatatttgtgtgtgtgcatgtacccagcatatacagagaggatgggattgtgtttctgtttaaacatacagaaaatgaaaaaaatctgaaaatatgtcatgcaaaggggacacaaataccactagtcatggattagcaatatgaaatgagctttattggtataaagtaagtacttgaagtaataaaacatttatctctgccccttgagttgcctgacccattyttctgcctctaacaactgctaggagtgttcttccagcatccccagtgagctcagtctcttggaaagagtctgtggcacatacaactcacaggaccmcacctcaacattataaaggaggagactcacatacctaccatgtggccctaaacaatctagatctgattaaatttcaaggtcaaccatatttctaagacttcaatgatgtaaaaaaaaaaaaaaaaaaaacccactgttttgtgtaccactgtgaggaagagtggaggatgctgctgattaaactgtgatacaatgctttgttattactttaatttttttcattttagacatactttcttttagactttaggcagtgatttttgtcctatattgcacaactctgtttctgtgtttttcttctgtttcaatgccgaatcccttgtgatctttttagatacttaaatgacaattgtactcagcctatgaaggactagccatactcaaaactcaattgaagtaataatatgaacagccaagaccaattttttcatgcatgggctttatcaacagcaattataagatgtatgctattttcatagaagagattaaaaacagtatgatttatagggttcctttgcctttcaaaatgtttgtctgtttgttgatattaaaaatcctttagtaggctgggcacagtgggtcacacctgtaatcccagcactttgggaggtcaaggcaggcagataacttgaggccaggagttcgagacctgcctgaccaacatgatgaaaccctgtctctactaaaaatacaaaaatcatccgggtgtggtggtgtgcacatatagtcccagctacttgggagtctgaggcaagagaattgcttgagcctgggaggcagaggttgcagtgagccaagattgtgtcactgcactccagcccaggtgacagagcaagactctgtctcaaaaaaagaaaaatatcgtttagtaaagaacagtggcatttatttcattactagaaatacaaggcttaaaaaataacacttagatgagatactacattgcctgaatttttttttaatttagcaagtgaactttaattcatcagcctatcaaaagtctttaccttactagaataatagtagaataatagtcaccagaacctgggaaggtgaagatggggaatgaagagagggtggttaatggatgcaaacataaagttagatagaaggaatgagttgtagtgtttaattgcacaataggatgactgtagtttacaataatttattgtatatttcaaaatagctagaagatttgaaatgttcctaatacaaagaaatgacaaatgtttaaggttattgatgtcctaaatatccctatttgattttcacatatgcatgtatcaaaatatcacatataccctatgcatataattatgtatcaatttaaaaattaataattttttaaaagttccctatccaaaactgtcctctgtgctgtcaatcatgacttatttttaaaggcccatggcctacaagacaatgtccagattctttagcgtggcatagatggccaatttgattctaatctacttctcatcctcatcttctgtcatctcccctcttcccaaatcttcacttgctgtctcctcccaccactttgttaccttcgtactcctcagtctcctttgttgacttctttttctctgattatgtcttaagtgttgacatgccccagggttctaccttgtttgtttaggggaaaaggggaaaaagccaagaactttcaagttaggcagactggttatatgactttaggcaagttatctttttgtaagcctcagttttccaaagtgtaagtggaaataataatactatattgcatgtttgctccaaaatgagagagggttcaatctaagatgagcacttagcacactaactggcatatgttaatcactcggtaaatgtaggatcttatttctgttctagagtttcatttatttttctcttgctggccataatattaataaaataagtatttttcttgtaaatctggcaatttttaaaggaaataataggtccagaattggagtaaataatgattttgcctatataggagtattcagaataagccgggtgtggtggctaatgcctgtaatcccagcactttgggaggctgaggcggggtgatcacctgaggtcaggagttgaagaccagcctggccaacatggtgaaaccctgtctctactgaaaatacaaaaattagctgggcgtggttgtgggcacctgtaatcccagctacttgggagactgaggcatgagaatcggttgaacccaggaggcagaggttgtagtgagctgagattgcaccaccgcaggactctagcctaggtgacagagcaagactgtctaaaaaaaaaaaaagaagaaaaagaagtattcagaataaacaataaaatcaattttaacacaatagcaaaatgtttaataataatttaaataatttctgctcttatcaaatgcagaagtgtatttaattgcatacaaactaagcattttaggagaaaagtgaaaagctgcatttttgttttattttttttaattaagacaagtattcattgatgaatagtgtttatatgatcaaaacataaacagtgaatgttcttgttttttaatttcaacttttattttagattcaggggtacatgggcaggtttattatctgggttttttgttggttggtttttttgagatggagtcttactctcttgcccaggctggagtgcagtggcacaatctcggttcactgcaacctctgcctccctggttcaagcgattctcctgcctcagcctcctgagtagctggaattacaggctcctgctacagtgcccggctgatttttgtatttctctgggtatattatgtgatggtaaggtttggagtttaattgctactgtcacccaggtagtgagcatcatacccaatagtttttcaacccttggccccctctccctctccccattgctagttcccagagtctgttgttcccatctttatgtccatatgtatgcaatgtttagttcccacttataagtaaaaatatggagtatttggctttctgtttgtgcattaaatcacttagggtagtggcctccagctgcatctgtgttgctgcaaggacacaatttcattcttttttattgctgcatagtatcccatggtgtatatgtatgataatttctttatccaatccattgttatgggcacgtaggttgattccatgtcttcattattgtaaatggtgctgtgatgggcatgtgagtgcatgtgtttggtagatgatttatgttcctttgggtttatacccagtaatgagattgctaggttgaatgatagctgtgtttcaagttctttgagaaatctccaaactgctttccacaatggctgaactaagttacattcctaccaacaatatacaagcattcccttttctcctcagcctcaccagttttgactttttaataaaagctattctgattggtatgagatggtacctcattgtagttttgatatgcatttttctggtgattagtgatgatcattttttgaaaaactgttttttaaaacaaagaaaagcttcaaattaaccagaattgttatattcaaattagagaatatgaattactgacaaaataaatttgttgaatcaaaaagccaaagctaagcaataataataagacaaaaatgaatataaacatttaagagtaatgatatcatagtctattatcaattttcagtaaatataacaaaaatgattatacgaatatatatgtataaataagaatagctagtaattttgagagcctacttaatgccagtcatagcactttatgaaaccacataagttctgcttgggttaactggactttccagaacatgaaacccctgagttggccagtgtgtccagacttcttgaggcctgaaagaagctctccaactgagtgagcttccattaggttggcaagtgtattagtccgttctcacactgcyaatgaagacatacctgagactgtaatcaatgaaggaaagaggtttcattgactcacagttctgcagggctgaggaggcctcaggaaacttacagtcatggtgaaaggggaagcaaacacgtccttcttcacatggtggcagcaagaactgccaagcaaagggggaaaagccccttacaaaaaccatcagaccttgtgagaactcactcactatcatgagaacagcatgagggtaactgcccgcatgattaattacttcccactgggtccctcccacaacacatggggattttaggaactacaattcagggtgagatctggatggggacacaaaacctaaccatatcattctgcacctggaccctcccaaatctcatgtcctcatatttcaaaacacaatcatgcctttccaacagttccccaaagtcttaactctttccaacattaacccaaaagtccaaggccaaagtcttatctgagacaaggcaagtcccttccgcctatgagcctgcaaaattaaaagcaagttagttacttcctagatacagtgggggtacaggcattgggtaaatacacccatttcaagtgggagaaactggccaaaatggaggggctacaggccccatgttaagtccaaaatccaacaggacagtcaaatcttaaagctccgaaatgacctcctttgactccacgtctcacatccaggtcacattgatgcaagaggtgggctcccacggtcttgggcagctctgcccttgtggctttgcatggttcagccctgctcccagctgctttcatgggctggcagtgtctacaacttttcaggcagacagtgcaaggtgttagtagatctacagttctggggtctggaagacggtggccgtcttctcacggctccactaggcagtgtcctagtgtggactttttgtgggtgctccaaccccacatttcccttccgcactgccctagcagaggttctccatgagggctctgcccctgcagcaaacttctgcctgaacatccaggagttttcatacatcctctgaaatctagtcagtggtttccaaacctcagttcttaacttctgtacccctacctgcatgcccaacaccacgtggaagctgccaaagcttgagacttgcaccatctgaagcaatggcctgagctgtacattggcccgagctgtacattggccccttctagtcatggctggagctgaagcagctgggatgcagggcaccatgtcccgaagctgcatagagcaggggggccctgggcctggccccaggaaaccatttttctctcctagggctccaggcctgtgattggaggggctgctgtgaaggtctctgacataccctggagacattttcaccattgtcttggcaattaacattttgctccttgttacataggcaaatttctgcaagaggctcaaatttctccccagaaaatgaggttttcttttctatcatattgtcaggctgcaaattttccaaattttatgctctacttcctcttgaatgctttgcctcttagaaatttttcccccggagtgtaaattagttcaaccattgtggaagatagtgtggcgattcctcaaggatctagaaccagaaataccatttgacccagcaatcccatcattgggtatatacccaaaggattataaatcattctaatataaaaacacgtgtacgcatatatttattgcagcactattcacaatagcaaagacttggaaccaacccaaatgctcatcaatgataggctggataaagaaaatgaggcacatacaccatggaatactatgtagccataaaaaagttcatgtcctttgcaggaacatggatgaagctggaaaccatcattctcagcaaactaacacaggaacagaaaaccaaacaccacgtgttctcactcataagtgggagttaaacaatgagaacacatggacacagggaggggaacatcacacaccagggcctgtctcggggtggggagctaggggaggtatagcattaggagaagtacctagtgtagacgagttgatgggtgcagcaaaccaccatggcacatgtatacctgtgtaacaaacctgcacgttctgcacatgtatcccaaaactgaaagtataatttaaaaaaaagaaaaagaaatttcttcccccagataccctaaatcatctctctcaagttcaaagttccacagatctctaaggcagcagcaaaatgccaccagtgtctttgcatagcaagagtgacctttactccagttcccaagaagttcctcatctccatctgaaactacctcagtcagcctggacctttttgtccatatgaccattggcattttggtcaaagctctaggaagttcaaccagtctctaggaggctccaaattttcacacattttcctgtcttcttctgagccctccaaattgttctaatctctgcctgttactcggttccaaagtcacttacacattttcaagtatcttcacatcagtgccccactacccagtactgatttactgtattaagccattctcatgctgctaataaagacatacctgagactgctatctataaaagaaagaggtttaattgattcacagatccacagagctggggaggcctcaggaaacttacaatcatggtggaagggtaagcaaacaacatgtctttcttcacatggcggcagcaaggagaagtgcagaacaaaggggggaaagccccttataaaaccatcagattttgtgagaactcactgtcacgagaacagcatgagcgtaaccacgcccatgattaatacctcccaccaggttcttctgatgacatgtggggattatgggaactacagttgaggatgaactttggatgggaacacaaagcctaaccatatcaacaagtatatcaaagaagaatcaaagaattcacaaaaatgattcaaatacaatcagtctactcttaggttcctgatggatgtgttattagctatatttaacatattgaagaagaaaaacagagaacatactgaatactgtaatatatgatatgaccattcttgaaatcacattttcactaagtgattaagcttttggaaaactggccacaaagttgacctgagactgatttggaagattggggctgatttgtatgtaaatataatcctttataattaaaaatgtaactactacctagacaaatagctgtctttttttttttttttttttttttttttttttttgagacagagtctcgctctgtcagccaggctagagtgcactggcacaatctcggctcactgcaacctctgcctcctgggctcaagcaattctcctgcctcatcctccccagtagctgggattacaggtgtgtgccaccacacccagctaattttttgtatttttagtagagacagggtttcaccctgttggccaggctggtcttgaactcctgacctcaggtgatctgcccgcctcggcctcccaaagtgctgggattacaggcgtgagccacggcacccagccaacgaatagctttcatacttttttgaccatgacctgtagtatgaagtgtaccttacatagcaacccagtgcccaaatatatgttgtgtatttgtgtgtgtgtgtatctgaaacaatatccttactatgtacagtacattctattagttgctattctgttctgtttctttttttattattatttttttaacactgtttgcaacctatgtgtgaaaacactcatttggataaatgtgtaatattttcatcttatggaagccttcatgaaaaatcagttttagaattgaaaaagaaaggtgaaaaagtaagaatgattataaaggatactagagaaatatggagtcatcgggtgtgactgttgtataaatatccagaatgcttcctagacgtgtttgtctactatgtgtaggagcaagctaatccaacctctatatcattttgaattaatactgcgtactgctgaaataattgttatgtatccccatatttttgtcctgtcccttttctgcccctttgagcaatcttgaacaaattggctgtggttttcttagttggttggaattagtatcatttacaaatttgaataattctagtctgtactctattcctccgaattatttataatacagctatatggctaagactcagagaaccccaatactttcattctttatctagagaggtgtttagaccacgtcttcaaaaaaaggtacccctccaattcaatagtgatttcctttgaaaaatcttattttgaactttgttgacttttttgaaggcctcctatttatgtgttaacattttaatcactcagttacatagttcttgaggaactgcaataaatagcaagaattcccactgcagaaaccgtgttactttttctcaaataaatttgtttatttatggctttttatacacagagcacttgccttagaataacttataaaagtagtgttaccgtaaactgttctagcccgtcatgccatttagctcatcataagaaataaagtatgtttagtaataatgtttgttaagtgttaagcagtactaatatcaaattcattctttcaacaaatatttattgagtacctattatgggccaggcatttgttctaggttctggggatgattagtgaataagacacagaaattcctgccctttggtgctcatactggagttggggagaaacagagattttttgtcaagtgaaatatatactcatttagaacctaacgggttatatgaagaaaaacaagcaatgaagaagattgcggacagttcatcctgcctgtagttcccagcccactgggcatgtaggaggctcaaagtgagtgccgtggtttttaagtttcttctgaaagtggccaatcagcaaggaaaaaggcatcagacctatagatgctgcatgaatgtaggtattcaggcaaaaagcaatcagatatctctagtatggaagaatggttgtgaagcatatttctttgtggataattagtcacatttatttatcatttgtgtgtgtgcctgtgtacacacacatcagtgcacacatgcgtgtgcctttaatacaccttatttatctttggrtcgtaggggagagggattcttttgtgttcacattctgggttatttttaataattgccttattttttgttattgggaagcagtaacaagtattgcctgaacatgattctggaaccagactcactggattcaaatctcagctttggcaattactagctatgtaaatttggaaaagttttttaacttctttggtttcagtgtcctcatttgtaaaatgttaagttccaaataaagcaactttcattgaaatatttcctcagaaaatgcaggggtttatttttttaaaaacagattgtgtcttataatatctaaggggtggaaaaacaggacagaagagaaaaggtaacgtttaaaaataggcaaagacaatctgaaagggctacgtacggtatgattccaactatgtaacatgctggaaaagacaaaactatggagtcagtaaaacagcagttgccaaaagttaggaagactccaccatgcctggctggtgtcgtgcattctatggggtttagacagatgcataatgacatgtgtctgtcattatattatcacacagagtagtttcactgccctaaaaatcccgtgttctgcctcccaggctcaagcaattctcatgcatcagccttccaagtagctgggactacaggcgtgcaccaccaaacctggctaattttagtatttttagtagagacggggtttcaccatattggccaggctggtcttgttggccatgttggccaggcctcaagtgagccgcttgcctcggcctccccaggtgcatgagccactgcatccagctttaatttcttttaatttctttctttcttttcttttctctttttttttttttttgagatggagtcttgctctgttgcctcgtctggagtgcggtgacacaatcgcggctcactgcaacctctgtctcctcagttcaagctgttctgccaggttcaagcgattatcccacctcagtctcccaaatggctgggattacagacacacaccaccatgcccagctaatttttgtatttttagtagagacagggttttgccatgttggccaacctggtctcaagctcctgacctcaggtgatccacctgccttggcctcccaaagtgctgagattacaggcgtgaaccaccatgcccggcccagctttaatttctttatgttggttttcacctttctctcatatctccttgagtaacttattagtcagccttttaaattatttgtctagtatttcaaattatttatctagtattatcttggtttggatccactgctggagagctgttgtgatcttttgggggtgttatataatcccgtttttttcatattgccagaattatttttctggtttcttcttattggggtagactattttgtctaccccagtgagaaggaacttatttatttctaattcaactgagtttttttttttttagtttttttttactcgttggggatgtgactttatggtttcttagctagctttgactcagcattttcagtgtgaagactctgtatgagttccttagttgtagagaatctttgtgtgatggctttctcagatgctgatgatagtagtgatgtgctggatttgtgagcaggttcactgtctcctgtggggctggaatggcagaggtctcatgaagcttctctcattccctagtgatgtgcccttaagaaaaaaaaaaaaaaatccccagtattttattcacatggttgaacagtgcaagcttgaggccagtaggaggtgcccataggtaaaaaccagcttctactaaagcaggtggataaatgccatacttaatagtgagcagagctcccagccttgacagaagcagctggggaaggtstatgaaatgcactgaggtcttttcagggagaagggagggagccaccacagctctccttccaggccaacaggaaagtaatacacctcccaggcacactcctgacctgctgttccagctgttcaaatcagaaaggcatctcttttcatctgcaggaatactgatgttccatgtagactttccccctatgagcccagcackgcacctgtgcctctgatgaaaaacaacttcccacaagtggaaagttcagggactcaaggcctgcagactggtttcttttgtcccacacggtgcctccgtaatgtgcggcaytccccctttacctggagggccagactactgtgaatcctgctactcctctgggtctagctgctcagtgggactcccacactccaggatggtactggagaatatccgccaaggatccagtgatgtgacctgtcctctactctcccagcagcgggtaccagcaccagttctgatgggggtaggagaggagtgacgtagactctgagatttccttagttacaaataaccttagtgttggctttctcagatgccagcagtagcagtaatgtactgggcacatggacagactcaagacctcctggttagccgaggcaatgcaggcaatggcaacagctgagggcatgcagaagttttctccttcctgagtgctgtgttattctgccttcaggtgtcataatgggctktgcctggctaccagccaggaggtggtgcttgcaaaagagtaccaggtgcggtggtagtagtggaatttgtgcttgccttatgttacccagggcaggcactctggggtctcaggcaatgggcggggctatggagcctccaaatatccctgtccattgtgttatgctaccagggctcataaagtggcaaagcctggtgaggactggaccaggcaagtcctcactcaggctctccaggtacaagcacaagcagtgtccccagtggggatcagagaacagctttctggccactggggtaatgttccaraggggagcagagctgcctctggtgcacagaagaatccacacagggagtgggagcaggagggagtagtagaaggcagtaaggcccactcagctcccatgcacttggcacagcaagtcccataccctcagtattctgctaacagcaactagctgtgttccaggcagtctacacttagaacacaaaactgccccaagcagtaagccttcctgccagcgatagaaaccaggctttcaggccatgcccctccctatccacctgcgaagcaggggcgcccaacttctgcactatagcacacttcatgccagccccctggttctggccgacagggttagtctccacttaaaatcatattgcgaatctcaggagctcttttcaacctgttactacagcctgagttactgagcagacttctgtgaggtaggatcaggaatggctttcctccatccccgctggaatctggtagtgcgtgcaaagcacatcctgatgccactccttctcatgtattctccacgctcactaaattggctcccatactgagtagggttaaggccttcccctgtggcctgggctgcccagctttgctgtgggagtgtgtgttctggtggctgagtctccccatcttatgctctggagattcagagttttccatctggttcacagtgtaggctgctgccaccacttcttttaaaggatctgtggtttttttcagttcttctgttaaattcttgtgttgcttcttgtgaaaaaaagttcacagtgtgaatctctacacatactttgtttttccaagtaggagaggtatgctaacactgtctccagtccaccatcatgtcttggtatcctccctacagtactcccagtatctgcaggtcacagagccacagaggctgtggcagagccacctggatcctctaggattggaggaaacagagcaatggagataggacctggagttgggagggcagatgctcagaaattattattaactgttatcactctgttacttatttttgaggttgttctgatatggaattacatataaagtaatattttaattatgttggacataacatttatcttccatatgaatggctgattcattacatggacaaaacatttcactttcattgtagtagtagctctgtgtctaaccttgccaagtgcttaatccaggaagtcttggttatggttcattctgggaaaaaattcagttaatatggatccagacagtatgctagtatttgttatttaaatcatgcttgtataggtgcaaacaccaggtcatataaatgtgtgtgtttgtgtgtgtgtgtgtgtgtgtgtgtgtatgtgcacattaccaaatgccaaccaccactgaagtgggaaaaacaatgacttatttataaattatattctgtttatacgtcaaacaaataaggtaattgtttaaattttttacctgccggttgttcctcgaaaactcatgagtgactataatttttttcgtttcagagctatttgaaaatcacaatgcaaattctttatacacacacatacatacacacacacacacatcccaatcagcaatgttatacagttgaaccacattaaaattaatttctcaaaggtagctttgaaggagaaagaagttgcaaacacttgaactcaaattctgttctctaaccctaatctcctttccttccagctctcctagttctttcattcccactaaatttgtactttatttggactcattacaagtccctgtctcataaagcccttccatatttttccaatctgtcaagcccctcctcgttttacttttcttcctgcctatccttggactttgtcagccatctgagtactagaattcaccatctctctagattgctttgtggccaaatttatacagcaggcttttcttgacaatttctacctttagcatattatcttacaatctgataattagcctataaatatttaatggaagaaaggcaagagagagaaaattcttaggttttgcagtaacaatactgaaaaattcttgtggaaatctgtgtgactcgtcctgcttggaagcattatgaattcatgttattgaatatcaactaggcccttaactactgttgcccagtgtttttatttttctgtctccatcctatttcccattatctccattgcagatcacttctaatcccaaagctatcaattctattatctgtctccttttttcagtatctctccttaccctttttctcctctttagtacccccttcaaagtrtgtgtgtgtatgtgtgtgtgtgaccaaatgccaaccaccactgacacacatacatacatgggggaagtggtattggcataggcaactttcaaaagttaataccctatctttgtgcttaatttattcttctctcctcccatgtcagctacactctcctcagtggtcattaatgacctctgaatggccagcattttcttctcagagcctatacaatttgatctatctgtggcatggcattatggatattctagaaattctgtcctgttttggcattacaacacaattctccctggctctcgtcctgtaactctgatggctctttagtctatttagctgatgtcttcatcttctagcccttaaatgtaggtgtccctcgggtgcctgcccttttctctgttcttacacctcaggagagattctaaaacattagacgaagtctagaatcaagcccagtgagtataagaatcatcaaaaattctagctggaagaaaaaaaccccatcaaacagtgggctaaggacatgaatagacagttctcaaaagaagatatacaaatggcaaacaaacatgtaaaaaatgctcaacatcactaattatcagggagatgcaaatcaaaactgcaaagtgataccacctcactcctgcaagaatggcgtaatgaaaaaaatttttaaaaaatagatattggcatggatgtggtgaaaagggaaaactttttcactgctggtgagaatgtaaactagtacaaccaatatggaaaactgtgtagcttccttaaagaactaaaagtagatctaccatttgatccagcaatcccactactgggtatctgcccagagaaaaagaagatattatacgaaaaagatacttgcacactcatattcatagcagcacaattcacaattgcaaaaatatggaaccagctcaaatgcccatcagtcaatgagtggataaagaaaatgtggtatgtatatataccatggaatattactcagccataaaaaggaatgaaataacggcattcacacaacctggatggagttggagaccattattctaagtgaagtaactcaggaatggaaaaccaaacatcatacgctctcacttacaagtcacagctaagctatgagaatgcaaaggcataagaatgatacagtggactttggggactcatggggaagggtgggagcagggtggaggatacaagggtacacattgggtacagtgtacactgctcaggtgatgggtgcaccgaaatctcagaaatcaccactaaagatcttaatcatgtaaccaaataccacctgttctccaaaaactcttgaaataaaaaaataataataaaattctaagcccagctacttgggaggccaggatggatcactggaggccagtagttcaagagcagcctgggcaatatagcaagaccctatctctaaaaaaagaaaaaaaaactacaaaacttagctgaatgcagtggcgcacacctatagtcccaactacttgggaggctgaagtggaaggaggattgcttgaacctgggaggcagaggttgcagtgagccgtgattgcgccactgcactccagcctgagcaacagagtgagatcctatctcgggcaggggggaaagaaagaaagaaaaaaacaattagccagttgttgtggcatgcactatagttttagccacctgagagactgaagtgggaaaatctcttgagccgaggagtttgaggctgaaatgccaccacacttcagcctgggcaacagagtaagaccttgcctcttaaaaaaaaaaagaatcacgtaagattcttgtttaaaatgtaaaacaggcttctagatcctgccctcagaggttgtgattaagtaagtctagaatgaagtccagaaatctggatttttaacaagctctgcagtgaactatgattccgccactgcactccaacctggatgacaaagcaagaccctatctcaaaaaaaaaaaaaaaaaaaaaaaggaatgcagggccacaatttgaagtagtaatgttctatagttctatctacttcaatgacttcagtcatcacttccatgctggttactctcaagtattttaacatcccattcatgaattttccttacttggaccatactttgtggatcttaagaccaaaagcggagctgataatcaactaccatgtccttgctttaattattgacataataaaatactagcagaaacactggtaaatagctctacactaagatcccactgtccgttccaccacagtctcatctgtcctgtggcccctctcctgagacctgcctgtaatccagcgacaaagaggtcatacctgagacacagagtttcaccaatattttaattggttgaaatgtatcagttaaatattaccgctgttaaagatgataatgttaatcacgtgggaacatgagagaaggaactggtattagtagggaggattacaagttcaagacgtaaaatgatttaygtactaatttggatggagtggcctacatcaagtccaagatcactaggactgtattcttcaaatctggctgattatcagaatctgagacccaaccctgagaaattttgattcagtaggactggggcccaccagaatcactagtaggacccaaaaatcacttattttttggtttgtttttctgggttttttgagacagagtcttcctctgtcacccgggctggagtgcagtggygtgatctcggctcactgcaaccacctcctggattcaagcagctcttgtgcctcagcctcccaagaagctgggattacaggcatgcgccaccacaccaggctaatttttgtatttttagtagagacrgggttttgccatgttggccaggctggtctcaaattcctgacctcaagcaatccacccaccttggcttcccaaagtgctgggattacaggcatgagccaccacgcccagccagaaatcactatttttttttacattttccccagcaattgagaacatagagaarttgtaccaaagtgttgcccccctatcggacctcaagcaggcctttttcattcctagcacgattaaaaagattaagcaaggatatgtgactgattctgtacaamctaccaccactgctagaaagtatcacttgcatatattttatagacagaaagcaactcaatgttaaattccactcagcagtattcattttattcctggcaataaagaacttcatttctagtttctgtgaaagtaaactccccaaggaaaaaaactccacatgtaggaaaaacatgcagcaaaatgtagtcacctttatattagtttatttgaattttaagagaaaaattgtaattttagattctcatctaagttaaattagtacttgaatcaaaagatataatgatgttttaatcaggggttacttttctctgaatcatatgtacaggttattgaaacaaaggaagaataacacttctgtaaaatgttgtgtcatgggttttatctagagtcacttattacgtatatgattcctgagtcactaattactaaggctttcctataaggaaaagattactaacaataggcaatgtgagcaattgcaaaactttttgaatagtaattattataggtacagaaagatttttgaaaactctattgaaggaattaaattctaataaattatgtttatttcaaacatggaattagcatcactttttattcararatatgtacttttttcctgacaaatgaaaatcaactttggggatttagaagcctacaaacaggtttataaagaaatgtatctgtaacactaacagcattattatagtatttattatccagagtaaggcggttataggttttatgttaaagataccttttgaaagtaaggcttctggcccttaactttgtttataatactaaaacctttagccgggcatggtggtgcatgcctgtggtcctggcgactcaagaggctgaagtaggaggatcacttgagtctgggaggtcgaggctgcagtgagctgtggctctgcactctagcctaggcaacagagtgagatcctgtctcaaaaaaatatatgtatatattaaaacctaatatatgtaactactttcatgaaaaaattgaactaaaataattgagactgctgctgtatattttgtgcaactaaaataattgagactgctgctgttatgttttgtgcaattgaaattagatttggtatgttttaaacagctcattctagacagaagttaactgaaattcataaatgttcttagttattccctgccaccctttscccacacacacacttgaactgttctgcactttgaaacacaaagcaacttgtcagttcagtttattcagtcagggtcagttctgtgaaaacaaagccaaggcaattgtttgatttaattgactagacaaactggttatacaggttagtagaacttagttttatttttgtccagctgcatatttgaatgttcataaagtaacttagtaaaataataagattccagtgacattgtaatatattttaaagaataattaccaaagcaaagaaaaaaaacattctaaaacccaaactatagaagctattcatggtatttttttctttatggctccactttcactataatgaaatgtgttcccccaaaaaagtagccttcttttctttcactattcatttccttctttttttttttttaatttttttttgaagattttttttcctgggctgtagttaatataactatcagaaaatttcctgtacaatttagatgaataaatgcttttacagaatagttctctatgtgcaagcagacatcctctaacagttggtcagcccccttttggcttcagtgtcctccttacccagccaacctcatggctgatcattttaacaatrttctcattactatccttgattctttctgcctcccaccatgctttccactatatccatcccactgttccctgcttcttcagctcctgggcttctaatcactcattattttattaaaatgagtggaaaaccaaaaaattgatatgctaaagtatactcttaaaggtcttaatactttaaaagtatatagatctcatgaacataattcatttgaggaaaaaaatacaaatcatttcttgtcccaggaaaacagtaaatctttaatggaactttttagcaattatgacaaaaagaatggaaaaatgtttaaacatatataaaaggctagacgtttatcgycaaatagtatctaaaggtcatagaatagttaggaattctgtcattttgttttgtgtaataaatacccccttccttaccctttcaccctaataatagatatccaccattttgttgtgattatccaactatagagtacctttttcaagaactcattatataccaaagtaggagcttgctgacactgataatgctttatttagttttgtagtgacatacaattaccatttgcttaggaaaaaaaataaagaacaaaaacaagtaaattttttaaaactatggttgtgtatatataagttgataaaaatcctttgggagaaaacttttgtcttgtgtgttaagagcattaaatagtcataccccttagcctagtgtgtcttctatcctgaaaaaaaattaacaaagcaaatactaacttaagaaaaaaaactacagcactgaaaagatttgttgtaatattgtttatgctaacataaattatgtaaatttttatatattgtttatactgacttataatttattactatacatagtgtaaattatgatacattggctttggtaggcagttttgtaaccgctaataatataaataccatactattaacaatctagaaaaatgattctggtataggttatgtgaaaaggcacaaaataaaattgtatatagtacactagcaatgaacagtctgacaaaggaaattaagaaaacaattccatgtacaatagcatcaaaaagaaaaaaatacagccaggcatgatggctctggactttgaaaggccaaggccagaagaattgcttgagctcaggagttcaagcccatcctgggcagcatagggagactctgtctctataaaaaataaaataaaattagccgggcatggtggctcatgcttgtagtcccagctactcaggaggctgaggtgggaggattacttgagcccaggaggtaggctgcagtgagccatgatgttgccactgcactccagactaggtgacagagtgagtccctgtctcaaaaaaaaaaaaaggaagaaaacatttaggaataaattaaccaaatggacacaagacatcccatattcatggattagaagatttaatgttgttaggatgataatactacccaaaacattctacaaattagattcagtccctgtcaaaatcccaatggcattttttacagaaatggaaaaactgatcctaaaattcatatggaatttcaaggaaccctaaatggccaaaacaatctttaaaaggaaaaacaaagttgtagggctcagatttccagatttctgaacttactgtaaagttacagtcagcaaaacagtgtgcaactagaataaggatggacataaaaacccacggaatattaatagaatagagcccagaagtaaacacttgcctatatggccagtcgttttcaacaagagtgctaggaccatttcatggagaaaagccagtcttttcaacaaatggggctggtaaaactgagtatctacatgcaaaagaatgaagttggacccttaccttacaccatattcaaaagctaactcagactggatcagagacctaaatttaagcattaaaggtataaaatgcatagaagaaaacataggagaaaatcataaccttggatttggcaatttctgcaaaaggacaagcacaaaaacataaaatagataaattgaatttcctaattataaaaaattgtgagttaaaggagattatcagccggacccaatggctcatgcctgtaatcccagcactttgggaggccaaggcaggcagatcacttgaagtcaggaatccgagaccagcctggccaacatggtgaaaccccgtatctactaaaaatatgaaaattagccaggcatggtggcgcacgcctctaatcccagctactcagaaggctgaggcaagagaatttcttgaatccaggaggcggaggttgcagtgagctgagatcgcaccactgcactccagcctgggtgacagagcaagactccatctcaaaataagtaagtaagtaaataaataagattatcaagaaagtgaaaagacaacccacaaaatggaagaaaatatttgcaaattacatatctaataagactatattattaagaatatatagagaactcctacaactcagcaacaacaacaagaaaaatcacaattaaaatacaagcaaaagacttgggaagacttctctccaaagaagatatacaaatgcccagtatgcacatgaaataatgtgctttggccaggatgtggagaaattgtaatcaaatttcttgctggtaggaatgtaaaatggtatcaccactgtggaaccgttgcagttcctcaaaaagttaratatagaattaccatatgacctaacagttctactccacttctaggtagctacccaacagaagtgaaacaagaactcaagatatacagtatttgtccaccaatgttcatagcagcattattcacaatagccaaacagtggaaacccaagtattcatcaagagatcaatggataaacaaaatgtactataaacatacagtggactattatttaccattaaaaggaatgaagttctgatacatgatacaacatagatgaactttgaaaacgtcacactaagtgaaataagcagacagcaaaggacaaatattgtgttattccacttatgtgaggtatctggaataggcaaattcacagagacagaaagtaagatacaggtttctagggccaggagggaggagaaaatggggagtttttgtttaatgggtacagagtttccatatgggctgatggaagtgttctggaaatagaagtggtagctattcaacattatgaatgtacttaatgccactgaattgtacacttttcacatgattaaaatggtaaattttacattatattttaaaacacatttgtcaaaaatttatacataatgatttggatatataaattatgtatttttaaaacaagggaatatgaagaaatgaaaaaattattgaattatggtgtgaatatttttagtagaagtaaagctgaaataaaagagtttaacttttagctaagtgtttccattttaaaaagatatattttatgtcatatagcttttcagaccaagacaaatactaagaaaatttaagtttatgcattctcaaaattgctattaatattttatttaaaattttttcagccaggcgaggtggctcacacccgtagtccccgcactttgggaggctgaggtgggcgatcacctgaggtcaggagttcaagaccagcctggccaacatggtgaaaccccatctctactaaaattacaaaaattagtggggcatggtagcaggcacctgtaatcccagctactcggaaagctgaggcaggagaatcacttgaacctggaaggcggaggttgcagtgagccgagatcgcgccactgcactctagcctgggcgacagagcgagactgtctcaaaaaaaagaaaacaaaaaaaattattgtttatagttgctattaagaatagctatattgattcactcttaaaaccttcaaatttacacaggaaaagcttttcagaataattcatgtcaaaggaatttctgtactatatttgtgctagagcattttgaatgattttattttgttgtcacattttctagattttaatgaaacctgtgtttctttagcttgacagagccaattcgctattaaaccagactcaacagccttacaggtatctcattgaatcagtgcgtcagagagattctaagattgattcactgacggaatctattgcacaacttgagaaagatgtcaggtaaaccatctacaaatcttttatttgaataataaagacattgttaccatattgctgctgtaggtgaatttgggttgtaaatcatgaacagaaaatttaaataatgaaggtgtcttaaatgtaatgaatattaaacttttcttagaaaaactaaggtcacatcacatcaggtgttcacattccacctgtgatcagatgtcttagcatggaaataacaatgttacacttatgagcataacattccatctatcctagaggacacaaccgctattggtccttgtttccctagaactctttagtgtggtgtagaytgaccagagggagaggaggaataaaaccagatgccatttgtgtcgttaaaatggctttttaaacaacaacaacaaaaaatttacatttacttagatttatgttgatttttccaaggaatttttaggcttttcttctgaccttttacatgaaagtaacttttaagtgtaaataaataaatttctttcacttccttaatttgtaattgtttctgtatgagatcttatccaaaaaaaatttgctatgaccagtttggttttttaaactgaaattaaagaatgaagatatgtgtaaatgaaacagttttacttgtggatagatggttagtttgcttagttactagatttccaagattataagaataatttagatttttatgggtaaattattaactgattatcaatgtaaaagcagagaattaagtgggaatagaaatggttaaatcaaggaattggaaaacaataaggagaagatggttgttaaatccaggtttcttaaagtatgcaaacaaaaatataaacctattggtaactaattccaaagtataaatgttatttttaatgaatcacagtaattaccttctttcatttctaccccaccaaaataattggtctagaactttattcctgttcttaattttttatgatttgtttaaataatttaggagcacatttataccttaaatgtgtcaaaataaataagtttgtttctagattaattttaaagttaaaaattctgtatacaacctacaataataaattaattgttctataaatagttcttggggacaatagaaattatgtctttcacaattcactgggcacctgattatcttagggaaattgaagaaagaaccccaaatagaattttttcctcctatgttacatatttctgttaaatttgaatattttttggccaggygcagtggctcacacctgtaatcccagcactttgggaggctgaggcaggcagatcacctgaggtcaggaattctagaccagcctggccaacatagtgaaaccctgtctcgactacaaatacaaaagttagctgagcatggtgatgcatgcctgtagtcccagccactctggaggctgagacaggagaatcgcttgaaccggggagacggaggttgcagtgagctgagatcatttcactgcactccagcttgggcaacagagtgagactctgtctcaaaaaaattaaaattaaaattaaattttgaatcttttttttttttttgaaacggagtctcactgtcacccaggctggagtgcaatgatgtgatctctgctcactataacctctgcctcccgggttcaagtgattctcctgcctcagcctcctgagtagctaggattacaggcacacgctgccacgcccagctaatttttgtatttttagtggagacagggtttcaccatgttggtcaggctggtcttgaactcctgacctcatgatctgccctcctcggcctcctgaagtgctaggattaaaggcatgagacaccatgcccggccttaaaatttgaatcttttatatgtcttattttaccattatttyttgtgatgaggaggtatataaaaatcctgaggaaaaaaattactcctttcacagttatctccaaacaaatttatttgattatttattttactaagaattaaggtagcttaaaatgtttaatatagagaaaataatagctagctgtaggagaaaattataaagatgaacaaattcagccacagagaaattaagcaacttgtcctctaagaacatgcaacattgtgatagagtaagaattcaattttatatctgtctgcttgctaattctattctcctaaccattaggttatactgcccctctatgttctattctgaataagggataatatttctttagctaaaataattaaggaagagaacaaaaaagtagtgtatcatagtgattaaaagtagcactttaatgagttgatcgttgttgaagcggggtgatagatatatcagggtttgctattacatattttctcttctgaaatattctataataaaattttttaaaaaacagattttaaaaggaagttttcaaattcaactcagtacttagttttgagttagggcaagtaatttaaactctctaatacctctgttgtccaatagaactttctataatgataaaaatattccatatctggctgggcacggtagctcaagtctgtaatcccagcactttgggaggccgaggcgggcggatcacgaggtcaggagatcgagaccatcctggctaacacggtgaaaccctgtctctactaaaaatacaaaaattagccgggcgtagtggcgggcgcctgtagtcccagctactcgggaggctgaggcaggagaatggcgtgaacctgggaggcagagcttgcagtgagccgagattgcgccactgcactccaacctgggcgacagagccagactccgtctccaaaaaaagaaaaattctacatcagtgctgtccagtatggtagccactagctagccacatatagatgttgagcatttgttttggggttttgttgttgttgttgttgttgttcttttttttcttttcttttctttgagacggagtttcactcttgtcacccagactggagtgcaatggcgcgatctcggctcactgcaacctccacctcccaggttcaagcgattctcctgtctcagcctcccgagtagctgggataacaagcacccaccaccacagccggctaatttttgtgtttttagtaaagatgaggtttcaccctgttagccagggtgttcttgaactcctgacctcaaatgatccgctggccttggcctcccaaagtgctgggattacaggcatgagccaccacacccaacctgagcatttgaaatgtggctactgttactgaggaactaaatttttaattctattaaaattaaattgtttaaattatctttaattttatttttaattttattaaaattaaagataattttaattgccctagtggccaatggctgtggtattgcacagtacagccagtttcctcatatgtgaaatgagagtggtgccgaggcagacagattgcctgagcccaggagttcgagaccagcctggacaacatggcaaaaccatgtttggttttgtctctacaaaaaatacagaaaaatttgccagtgtgatggcacgcttctgtagtcctggctactcaggaggctgaggtgggaggatgagttgagcctgggaggtggaggttgcaatgagcaactgcactccagcctgggtgacaaagcaaaactctgtctcaaaaaaaaaataaaaataaaaataatgagagtggtcctaacagcacccgattgatagggttgttctgaggaataaatgatataatcttcataatatacacagatataatagtgcctaaacattatattcaacagtgttcaataaatgtttgccattcttagtacttaccatacatgtaacaaatttttggttgaaaattatattaaaaatgagaaataacatttctcaaaatatgttgaatttcaacaaaaattaagactcccttaataacagcaacggttttcataaaggccatgtcatttatggaattaattaccaagaaaaattttgtactaaacatgagtcctttaatgttgtcttgtgtttcataaattaattgtgtgatattttagtacattctgaactgataattcacaggatatgaaatcttattcttaattgaagcaactaccttctaaagtgaaaagttattaatactttcagtagtttaattacaacacttgagatgttgctataggtgtaccctggtgacatgaatgaaatgctgtgatgtaacaatgccattaaaaagtcagctcagccagtaattcagatatggtaggatagatcacagttctgtatacccacattccttcatccctactcgaagcaaatggcatttcaaatcctagagtggaattatcctgggctttaaatacacatcaggctggtttctctccttatggtaaatgtgtctgtaaaattagatattaatatgaacccgaaggggtagttgtgaaaattaaatttaggggcatatataaagctttggcatgtaggagaatctcagtaaatgttacttccctccccttgtcttttatttgaaatttaaacattaatgatggcccatccaaaagcgttatcaagttattatgttccttagaaaacataaacaggaaaattcctattcctcattgctaggtgttgatgttagttgtaaaaatatttacatcaattgatgatttttaaatgtttttctaattcaataaaaactctttgaagaactgaataattgtatgcttttcttagaaaattaaacaataccactataccatacttaccccttgaaaatcaactatttatacaatatattcaatttctagaaaggctagagtaaatattcactaaaatgaaatcatcataaacacattaaaagctaacatttgagatgtcactattaactgctttaaattctcctatcattaaagtaatactttattataaaaatagtactgttaactttcttccaccaagccacaagagacactctgcgtaatacagtttgatctctacttcagaaaggaaggaagcttggaaagagaataattagcataattttctttgcctgttgtcagttctcagtttattcttaactggtagttaaagataagactacattgccaacttcccttacaaagctatcccagagtgtattgatccaggaagttaaggaacaatatatcaggaatgttttcgtattgcaggtgaaacagagccataaacatgaatttctaagtaataattaacagtgaatttaacaattatgggtgtaatataccattcaagatagatgtgcttacaaggagatttgttttgtagttgttttatgagtcactcatagaagctttgtattttcaaaggtaagtttccactgttatgaaatatgtyttatgaagactaaaattctattgagtaaatacatactagaagaagagtgaatataataatcatcatattcagttttagagacccacatgttaaaggttgtctccctgtggttcgagtatattataaagaagacaaaatatatgcccagatattgtaatcacagcaatattgtctgggaagtccacattgtttgtaataaactcatgtcttacaggtgcaacataattgttctgtaagccagtttatccccccaccatttattccatgtatatacggttgttttgctatttaattatagaatactttatttttgaaaagttaaaacacgacaatataaaagcatttgtaaagaattatccagtcaaaatcctttaattacctcgacattccattccgattacactacatattctttagaagagccagttggtatttgaaacagagagtgagtgtgtgtgtgtgtgtgtgtgtgtgtgtgtgtgtgtgtgtatgcactgaatgtgagtatatgcttatataccgtggttataagtgtatacatgtatatgaacatagacacatacatgttccttaaaagttcctagtcctatttactggatatttaaatttgaaaaatattttgccttcaaagtgattccagctaaagaggtggttagaattctagagttagagaaacatgtgatccttaccatgctttggagactctagcagaacatggcactcagtttcctttatactgttttgttcttttcaactcctcagctcttgtgggatctctggcgcctaactctaaaagtcagtttgtttttcagctgagctgcttacctttattggcatttaattactgttttactctgatgcctatttttttatctaaattagtaacactgtataacatttatatagttttatgagttcaacactttatataatcattcacatagtcctttgacatacatgagtattatgttctacttttacagatataaaaactgaggttcagtggggtggtatgtgttatgctttacagcacacatttgagtctgagtcagtggcacagttgggaacagaagtcaaaattgcatctagtccgtctcctcagaggacaaactatgatgcttccttctcgattacttggaaggagaagaatgtgggctttccctcttaagtcctttgaattagcagttgctgcagattgcctactactgtttcttgaattaaaaaaaaaaaaagtctgccaaatattattctaaagattagtggctttcatttatttatttatttatttatttatttatttatttatttattttttgagagagcctcactctgtctcccaggctggaatacagtggagcatcatagctcactgcagcctcaaactcctgggctcgagcgatcctcctacctcatgctttgatgtagctgggactaaaggtgcatgtctccacacctggctaacattttttttttaagagatgggggtctctctgtgttgcccagactaggctcgaactcctgggctcatgcagttctccaacctcgatctcccaaagtgctaggattacaggcatgagccagtgtgccctgcctccattttcttaaagtagaacttaagtagaactttaaaaatgtttttaccggccaggtgcggtggctcacgcctataatcccagcacttcgggaggccgaggtgggcagatcacgtgaggtcaggaattcgagaccagcctggccagcatggtgaaaccccatctctactaaaaatacaaaaattagccgggcatggtggcacacacctgtagtcccagccactcagacagctgaggcagaaaaatgagttgaacccaggaggcagaggttgcagtgagccgagatcgcgccactgcactccagcctgggtgacagagcgagactccgtctcaaaaaaaaaaaaaaatgtttttacctatttaaaacaattcttgttagttttaccctcacaaattttgtcttttttattgtaatcattcattagataattgccaccatgccaggccagaaattgaaaatcaaactaataatttggagacaaacgttcttttttcaagtttatcacagactaaatacctgattcacttacttaactcaattatatacctgataatttagtttgtaaaatattactttcagttttaaggatgttttaatttgtcttctagtatcttgtgttgtaatagtttgctgacatagtacttcttaccttttatgtgagtttctttatctttttacattttagtagtaaatagtcatctttaaaacattaattttatgcctatactaggcaggaaattattctcagacagcatctcagttacgttgtcaaatggattcttaagagaagaaaagctgggtgcagtgatgtatgcctgtagtcccagatacttaggagactgaagcaggaagattgcttgagcccaggagtttgaggctgtarttcattgttaccatgtctgtgagtagccactgcactccagcctgggcaacacagcaagactccatctctttaaaaaaaagagaaagagaaagaaaagaggagagggaagaaagaaaagaaaaaagaaaggaaaagaaaagaggagagggaagaaagaaaagaaaaaagaaaggaaaagaaaagaaaaagatcttctgacaaaataggccattcattgggccaaacattttagtggctggtctggaatatttatggactataaatttatctttagttcaaaccatcagattcatgtttattcttttaatatttaccatttattaactatatttatactaacataatgactttttaaaactggggttttttttttcagcaacttaaataaagaaaagtcagctttactacagacgaagaatcaaatggcattagatttagaacaacttctaaatcatcgtgaggtatttttcctattttgtcataattgtaatcattttaggcttttttaaaaactgctatcaggttaaaattattggatcccagttgtgcatgttcattaatgacttctcttatttatgtctcactgtaattttgtccttttttattcaacttttgatatacttcttagagttaattcttattcctagaataaccccttcttgttgtgttgatatctgtcactgaatttccccatattatttaataataatctgttttatcttattctgcaactagacagttaatttccttagtgtgcctctcgtcttctttatcaatgtatgcccagtgcctgtagtgtagataatttgtgttgagctttaaagttcataaaattattttcttttcttcatttgttccctaccaaaattcttttagagtaaatataattcctattttatagatggagaaatgagttttaagtggcttgcccatggcagttagtaactaagagataagttctgttttgttttgtttttttcctttaaggtttattgagttataatctacaaagaataaaattaaccttttttagcagacatgtctgtgatttttgacaaatgcacacagttgtgtcagcaccaccacaatcaatatatagaatagttctattactccacaaaattccctcattacccctttttagctgacccttttcctcaacccccagccctatcaaccacgggtgtattttctgtaactattgtttaccttttacaaaatgctataaaagtgaaattatcagtatatagccttttgagtctggcttttctcagttacaataatacatttgcaattcatatatattgttgcaatacagatgtataatatattgacctcaagtgatccgcctgcatcagcctcccaaagtgctgggattacaggtgtgagcctgtacatacatctacattagtcatatgtttcctttttattgctgagtaataagccattatatggatgtaacccagtttgttaattcattcacagtttatggacatttgagttgtttccatttgaggacatctccgaataaaatatctgtaaacaattaatgtacacattttaatataaacaaaagtttccatttctcttgggtaaatacccaggaacatgattactgcattgtatggcaggtgtatgtttaagtttataagcaactgtcaaaattttccaaagttactatacttttgcattccccctctacgatgaatgagagttccagtttctctgcatcgtcaccaaccattggtatttttaacacaaagccttttttctactgaactatcactgcctcatcttagccatctttttaccattttgttattctaatagaaaaagaaacttttttttttttttttttggagacaggatcttgctctgtcacccaggctggagtgcagtggcatgatctcggctcacggcaacctctgccttccgagttcaagcgaatctcttggcttaacctcctgagtacccgggattacaggtgcatgccaccatgccatctaacttttgtgtttttaatagagactgggtttcggcatggttggccaggctgatcttaaactcctgacctcaagtgatctgcccgcctcaatcctcaaagtgctgggattacaggtgtgagccaccgcgcccgaccagaaaacaaaacatttaaaacatatcattggtttatgagtatcctgatactagtctgggagaggtataccagatgttgggaagaaattattgggagaatattgttgagagaggggaactggaaactattactggaagcagttcaaaggtacgtatcctagagatggtgtcagaagaattggaggattgtctgtatctgagaaatggcattggagtgagttctcttaaaggtgtcttctatgtgatgggtgaaaaggatgagaaagtgtcccaggactagattgtaatgataacatttaggaaggtaagtcaatctaacaacaggttacagagctaggaaaagcttctctgaagatatttattctttcttctgagttcggacattctagaccttatccatcaccgctgctgtcacttatgtcctaggattctgctttcaagtaattgtttcttcactgtggaaacctgattcattcactatgtggaattttcgcaagtgtttttgaaattaaatatttaagagtagtaactacagatgaccattcagccatatcaactacatttttttaaagctagatattaatttttttttcagaatggcaattctcatttgattttaaggggatgtgctacactgaaaaatatatgagcagttccaacacttggaatcacattactcatgagtccaaataaaaaccaaaaaactttgcgtggtggattgagaagaaaatacrtttaagcatgcaaattaaattctagcagagctgggcacagtgtcacacacctgtagtcccaggtactctggaggctaaggcaggaggatcacttgagcacaggagtttgagactatagtgcactctgatctcacstgtgaatagccactgcactccagcctgagcaatgtagtgcaaccctatcttttaaaaaagaaagaaagagaaagagggagggagggttagagggaaggagaggaagaagaagaaggaagaaaggaagcgaaggaggggagggaaggagggagaaatttaaacactagcaagatgaaactactcattaattgcctactactacatgttattactggtatttgtatggatgcatatttagataattgtcagtttttatgtatttgacagtatatctttattttggcaagtatgttttaataatttaacattgtatagcttttgatgataccaaacatctaaagaaaagcaactttttttgttttaaagcaaagtaaaaattaaagcttagtaaaacaaatctaatgttattaatcattttctaagaaaccatttactaccaacttacatcatatatacacatgcaaaggcctccgcaaattgcatatatggaaagaaaacagctggtgtgaccccctagaaatgcttggccattcacttgaacatttacctgatgaaacaggattgatttattcacttgattgttcagaggatcatgtcctcataatagtcaatagataacattggttaagaataattctgatttttttttgaaaatgaaaatcagggctgggactagggtgaggcaagcaaggcatctaggacacatgatgtaaggaggtgcctactctcagagtgggcaaagaacatggacggcccctgggagccactgcttctttacctaaggccgctagcttgtctcaccctggtcaataccctgggaaaattatctgataccagtctggttttaatcagttaaatttggacagtgtaaatgagtgattcaaaaagagaccaaatgaactttttaaagtttcttattttcttttttgcattggacagctcttgctttaatgttgtgttgttttgttttgttttgtcttgttttgttttgagatggagtcttgctctgtcacccaggctggagtgcagtggcgctatttcggctcagcgcaacctccacctccctggttcaagcaattcccctgcctcagccccccaagtagctgggattaacaggcgcacgccaccacacctggctaatttttttgtatttttagtagagatggggtttcaccacgttggctagactggtctcaaactcctgacctcaggcaatccacctgcctcagcctcccaaagtgctgggattacaggcatgagccactgcacccagcctagctctaactttttttagcagtgtcacttagttctgattaggctgtatgtgttcatgtaatgtgaagtaagatcaccagttcatttacataattccaaaatatgtgttaaacagaaaaagcaagtaggacaattctaggttgacaattcagaaacatttggggcatgaccacagagagtttttattttctatattagtgttagctcaaaaatattagcttaaaagtatcttctctcatgttaagagttagggtgtggtgtgacaatttccaggaatgtgtattgatctcttacaattgagtatttcttgaactatgagtggaatattaggtgatgtttagtcctaactttttttgcgagaaaatatattcaacaactaatttcagaatgatataacgtgaagagcaggtggccgtagagagaaataggatattttaggttgacttttcagactacaaagctcaactgggttgggtaaatatattaggttaaaggatttacacaacaaatactaacttaaaaatgtgcataaattgaattgagagcttatacctgcccacacttctccattctaaattctccaggttttgtccctatattcagtaaaatgttcataaagcagagggggaaagggcaaaatatctctcctcacagaatttattttattaaagaacagtttaatgtcatgccttctgcttttgtagaagatcaaaacaaagtgtgatctctcttggttttgtaaaactaaggcagtctactaagtacatccacataaatgacataatctaatctttactacagtccactgataaatatcattgtcctcattgttagagatgaaactgatgctgataagagttaaataactcaactgtgattacgtagtcaaaactaaaagtaattcattttttccctgaaacaaaactaaggttctttttccttagtctcatttagacagaaaaaaactcatgatgaattattgcgtatattccaggaaaatttttgcctctgggcrtgaagttatattcctctttctttttttcataaaatgaaaactttgtaatttaatgtgtttcctttttgtcttcattgccagaaaactcagagctgaatatcttatccaggtgttataatcttttttttcctctttcacttttgatacctcagaataactttatctgtttccttcaggtgggttgtaatctatcttactctaaaatgtcttcacttgtactcggattaagacctcttaggtgtaaataaaatataaacctaaataattagatattgaaaagaggtaaaaggaaaagataaactgataggaactcacttttagataacagtagcaggacttcaaataaaacattcattttgaaaagatttgagtataagaaatgtgatttcaggcccgatgcagtggttcacacttgtaatcccagcactcaaaaaggccaaggtgggaggaacgcttgaggctaggtgttcagcaccagcctggacaacctaggaagacctcatcttcacaaaaaaatcaaaatttagctgggcatggtggtgcacatctgtgttcccagctactggggaagtcgaagcagaaagatagcttgagcccaggaggttaaggctgcagtgaatcataatcacaccactgccctccagcttgggtgacagcaacactgtcttttagaaaaagagaaatgtgactccttaaaatggcttctttcttgagcttatcactcagtaatcgtcattaattgcatttagttttcatctgtttttatccactcatctttgccttaacgaaacaagatttactgatcacctttggaaattctaattctgcttttctttgtatatattttatccacgtgtccttagaatataagcttttgagagtaggaaaagtatctttcatcagccaaatgcctaatagaatactgagctcagtcgttagaagctgatgtagaagcccttttctcatggctcttggagctgtagaagggcagtgggaagaacacctcttaggaagctattccagtatttcagtgagtgaaggtggtgtcttgaactagattggtgatgatgaggtgaaacaaaaatggaccgatttgaaagctatttaagaagcataattggccgggcgtggtggctcaagcctgtaatcccagcactttcggaggccgaggcgggcagatcacaagatcaggagatcgagaccatcctggctaacacagtgaaacctgtccctactaaaaatagaaaaatttagccaggcatggtggtgggcgcctgtagttccagctactcgggaggctgaggcaggagaatggcatgaacccgggaggcgaaggttgcagtgagctgagattgtgccactgcactgcagccttggcaacgacagagcaagactctgtctcaaaaaaagaaaaaagaaaattaagaagcataatcacggtccttggtgatttgagtacattagggactgatgaagagaggagggatgagaattgatgcctaggtttttggcttgtgtctttagtggtgctacaaagaacctagaagaaagaggtttggggaagaaaagttcaagaaaatatctaagtggatatatacactagagagttggaaatgtaggttcttgtgcccaagaaagagaattcatctgttaatagaaatttgaaagtcacaacataaagatgttactttacatggaaatagagtaaatgaactagtgagactatatagagtaagaacagaaaaaggcctgtgacagaatcttaatgagtaccagcatttaagggaagggcataggaaaaagtgcttacacaaagaagagtgaagagtgaccagcatcagtgatgagcatcaggaagagagtagagtccctaaagcccagggagaaccattcataacagagccagttgtacgcagtgacgtgctctcaagaggtcaggccaaagaaagatttttaaaaaagagtcatttggatttaataagatgctaaagggccggcacggtggctcatgcctgtaatcccagcacttgaggaggctgaggcagacagatcacttgagctcaggagttcaagaccagcctggccaacatggcgaaaccccatctctacaaaagatacataaattagccaggcctgggggcatgcacctgtagtcccagctacttgggaggctgaggtgggaggatctgggagaattgcttgagcccaggaggtggaggttgcagtgagccaagatagtaccactgcactccaccctgggtgacagagtcagagccctatctccaaaaaaaaaaaagaaaaagaaaaagatgctaaagcagtttcaatggagctggagctaaaaagcagataccagtgaaaaataggcaatccttagaatatttgaagaagaaaagataggacaattgaggaaggggcatgagatcaagagcttttgctgagccaggcacggtggctcacgcttgtaattccaacactttgggaggcggaagtgggtggatcccttgaggccaggagttcgagaccagcctggccaacatggtgaaaccccgtctctactaaaaacacaaaaattcgccgggcgtggtggcagacacccgtagtcccagctactcgggagcctgcggcaggagaatcacttgaacccaggaggtggaggttggaggttgcagtgaactgagatcatgccactgcactccagcctgggtgacagagcaagactctgtctcaaaaaaaataaaataaaataaaataaataaataaataaaataaaaataaaaaaaagcttttgcctctcaaagctagagattacacaatttaaatggtgacaggaagaagcaaaatagacattaaaagtacacaaaagaaagagataatcaattgagcaaaagtgataggaaaggagatccatagcagagtcatgggaatcagctttagaccaccagtgttaccttttccattttgaagaataraaaaaagaattatgtgaaaatagaagtaagtttataggtttagtggtaagtatttagagagttcccatctaatggatgttttctaatagaaagagatgtggtacagtcagtgttttgagaaaaatgaattttgaagtagctgtgtaataaatgaatgatgtacataaaagaattgccaagttgaaatgttatgtacttatagtagtaccattctgtgtaatttttctttagcagcacttagcaccccaggtgtaaacatagaagatggaaactagactgatccagaattacattctactttctactatatgtacatataaatatgttcaactctctcattaaattgtaagactggcattacctttatattccttacatcttctacattttgaaatactatggaaaaagccagcagtcagacagacaagacttgtattcatrtcccagctctgctacttaatagcagtgcatttttgagacaataatttcacccctctaaactcagttatctcatctgtaaataaaggtaatatctactttgcaaggttctgtgagaattaatatagcagtgttcctggaatataacagaactcaatgaatgtagttccctttcctcatttccttctgtgtcaagggtctttttaaatattatctatcatttgagactgggcacggtggctcctacctgtacccagcacttaggaaggccaaggcaggcagatcgcttgagctcaagagttcaagatcagcctgggcaacatggtgaaactgtctctacaaaaaatatgaaaattatccagggatggtggcacatgtctgtagtcccagcttctcaggaagctgaggtgagaggattgcttgggcctgagaggttgaggctgcagtgagcagtgatcgtgccactacagtccagcctgggtaacagagctagaccctatctaaaaaaacacaaaaaataaaaataaaaaaatattatctatcctttgaagccctccctacctcaacaaagaaaaacatacccttttctacctcattcctataactttttaaatatttctgttaatgttcatattactatgtaattaagcatctgtcttacccattagattgacaaattcctttttgtactttagcctttagcacaatatttagcagataataagtactcattcagatgtttcttaaactaatkgttcttttcaatcttcaataatataaagctgtcaaatagaaagctttagaaactgtcatcaaaaaataagtgtcactctgatactgaaatattttagctgaagaaagcacagaagctctcctgtatccaaggacaattttagatactactactgaaattttacttacatactacttttacatacaattttagatacatactactgaaagtaggccataggaagtcatatcccaaaggtttgtctacaggagagctacttcctaaaaccttggagatggtagttgtaggcacagcaacctctatggttatcacacttatacagaatcatatatatttgtggaatataaaacatctgttttggctgggcagggtagctcaggcctctgatcccatcactttgggaggccaaggtgggaggattacttgagtctaggaatttgagaccagcctgggcaacacagcaagacccctagcatggtggcacaaacctgtagtaccagctactcggttggctgttgtgggaggatcctttaagcccaggaggtcaaggctgcagtgagtcatgattgcaccactgcactccagcctgggcaacagagcgagactgtatcaaagaaaaaagaaaaatttgtttctgagacctgggatatcttctatcctctcattgcagtgtttttgccaataacacttctcagggcccacagtcatttcagttagtatttaaccagaattaatcaaccactccttactaagtacttagaatgtacaaggccccacacttacctgaacattggactaattcttattatcctggataactttcttcttacagcagtgtatgtcagataatgaaaagaaaacaaaccctgcagttagccaggtttcttgaaagtgaaatcacagtataattatcattcttttatggtatgtttgtgttcccagattctaactcatatgttctttgcgatttctcggaagatttcagggacatttcagcatcccaagtgccccttaggcaatccacttcataagaagttccaacaaattgcatttttctttatgtgtgtcactctttcggttcatacttaactgttttgaaattttcttargagtatctttttacatgtttttcttatgcacctatgtagttaaattttacagtcagcatgctaaaaaaaaactactgagcgggtaaattaatttttctttaaatgaaaatatacttgtttctcagattcacacatacatttctcatcatagtggtgctcttcaagttaaactgttttcgatttgttggatataaatgagtgtttttaaagagaaagataattattatagtgaaaaccaaaaacacatgtatgatacaagtcatattttccctataaagttttagaaagattttttttttccatgtaagggtgtgtgacttcaggtctgaagaaatttagggactaaaatgttgcaaaaaatactgcaaatgttgaatttacacacatactttatgagaaagctaaagctattgtattaacagtgagaatatatcttgaatttttataatctttttctatcaaactctaaaatgctttcagatgaattatgttatactaccctacttaggaaccagttacaaattactttcaagtaagtgtatctgggaatgaggaatcagagaaaggaaaagttttaaattagtcttctctgctgagaattggccttttgcttatgttttctaggattcaagagggaattaggctttttacccaaaatacatacttttcagtaaataataagtgtgtttaatattgatatattatcttgtagttttttatattcatttattttatttaagcctcacaacagctcattcttacacccatttcacagaggcaacaactgaatcacagttgttcattctgtaaaatgttaattctcctcagttttgagttgtgtaaaagacatttgaatttcctttagattgtactctctggaccactgtgtttatataggcttgtatagaacctaatagaactatgtcaaaattgttttggtttttgtaagtattttgatttcttctttaatcttttcattatcttcttttaaattataaatatctttgttgtatcctacaagtcagttcagtcttgtgtgacccaatatattaatatctcatcataaaaatattttatctgtgcatatatacccttttaattttttatatcacattttcacatctattatgtaacatatagacctagcaatttttaggtttctttttttaagaatgaaatgtgtattttcccactgcattttagaagcttgtgatatgttttcggttaaattaaaagtacatttctctgacctttttttgtcagtaaggagcaagtaaatgacttctcttgctatcatttctaaccctgtgcttatatgactatcttagaatagtagcagcttataacaaaccaaacaattctgagacataaggagacacacacacaaaaaaaaactacaaaactgtaaaatctctgaaactgtataatctctgaaaatatttggtggccaggccgggcgcagtggctcacgcctgtaatcccaacacttcgggaggccgaagcagggggatcacgaggtcaggagatcaagaccatcctggctaacacggtgaaaccctgtctctactaaaaatacaaaaaaaaaaaaaaaaaaaaaagccagggcggtggcgggtgccttgtagtcccagctacttgggaggctgaggcaggagaatggctgaacccgggaggcagagcttgcagtgcagtgagccaagatcacactactgcactccagcgtgggcaacagggtgagactccgtctcaaaaaacagaaaaagaaaaagaaaatatttggtggccaggagacaatattaacaattatatgagataattatagtcataattctgttagacaccatattggcaatatcttgttgtaaacttaagtcactgatcccgtatcaaggagctgacactaagagaaggctggaatacaacatggagaaggtacaggcactggagtgagtcatactctgaaaaccagtgctctaagtggaggatagggtttaaagtctgaagttgatgctgaaaatcaacaagaatatgcaacaaaacccatcaaacactactgaaatagtaaaggccagggtccagcacagtgggtcacacctataatcccaggactttgggaggctgaggcagaaggattgcttggagcccaggagttgtgtactagcctggtcaacataatgagactccatctctagaaaaaaaaattttttaaaataaataattagctagatgtggtggctcgtgcctatagtcccagcttcatgggaggctgaggtgggaggaccacttgaccccgggacttcaaggctgtagtgagctgtgcttgcaccactgcactccagcctgggcaagagtgagaccctatctcaaaaacaaaacaaaaaagaaggaaaaaaaaattttgatgaaaaagttaagaccagaaactagacagcagccagatgactactgttaatagaagggaaagcaattgcacttggtcacaaagccaggcatcaagaaaacatgaatgtcagaaagcagagtggggaaagtagtgagaagtccagggtaatcagtaatgagatgcacaaaagggtctgagcaaaccaatcagaatagaattaaggttcccacactcctgttttaagtcaacaatagcagtagattttaattcaggaacctacttcagtgtgttaataatagcttcttatctggatcactgttgagaattaccctaagatcatatccatgattgtgaaagaatgtttcaggtgattagttatgtcccggaggctgtaacagcccaattgtctctcatttgctatcattcgtataaaagcatgagctctcactaagccttcagtcatagatagggtatagctccaaaaatgtttctgtcatctttttttttttttttttttttttttgagacagagtctcgctctgtcgcccaggccggactgcggactgcagtggcgcaatctcggctcactgcaagctccgcttcccgggttcacgccattctcctgcctcagcctcccgagtagctgggactacaggcgcccgccaccgcgcccggctaatttttttgtatttttagtagagacagggtttcaccttgttagccaggatggtctcgatctcctgacctcctgatccacctgcctcggcctcccaaagtgctgggattacaggcgtgagccaccgcgcccggcctctgtcatcttaaatgtattagaataagaagtagataaacctgctctgctctagtcagtacttctttctttattctgttctaggcccaaaaattttcaatgtaaggaaaacaggatgatgaaagaattcttttcagtcataagagagatgaatgaaactggggatgtttagagaagataagacttagtgaaagataagaaattcaaagtaggcacgtaaaacaggcagtaagagatttgttacacatgtctccaaagtccagaattaaaccaaaggctagatgctatgaggagacacatcctgttttgttgttctacttttttttttttttctttttgaaacgggagtgttttggttttatagttgagtaaggaaaacctagattaatacctaatgtgtcttcatttttaaagcctgggctaggtggccatatagtcagaggggatttcttaattgtatagagagactgggctaaataacttgaagatctcttccaaacctgaaattgtgtgtatcacagacattgatggaaggcatctgcattattgtataatgatagctttgaccccagaaaggccttacttaatttgaatgctgtttcacttcttagtagctaaatgaacatggttaattttcttgagccttctttttatttatttatttttatttagaatttttttattttcctttgttgtttttttttttgagaaggggtcttgctatgttgcccaggctggtctcaaactcctggactcaagcaatccacctgccttggcctcccaaagtgctgggattataagcatgagccaccatgcctggccttcttgagttttttttattttttgtaatttatttatttatttatttatttttttttttttttttttttgaggcagagtctcgctctgtcgccagactggagtgcagtggtgtgatctcggctcactgcaacctccgccccccgggtttatgtgattctcctgcctcagcctcccaagtaactgggactacaggcgcatgccaccaggcccggctaatttttgtatttttagtagagacggggtttcaccatgctggccaggatggtctcaatctcttgacctcgtgatccacccgcctctgcctcctaaaatgctgagattacaggcatgagccaccgcacctggcccttcttgagtctttgaagcctcagtttcttctcttcaaaattaaagtaatatctacttcttggtatttgagtgtgaattaaattattatgtaagatactcagcacaaagcctggtacattgtagatactcagtgaacattcacttctgtcccctctcttcctccctccagacctaaaatttgtatatacttcttttgaggcaaagagacaatcccagggtgatgttaccctacaagtggaagcaagtatctagatagggagatcgaggggctgtagataacagcagtttgcagttgcagatattaatactattctacaatttgcagtacaaaatctgttttgtcctttatgtagtgtatagtggtattgcattcaaagtaactttttaaaaataatacattatatttgctttaatagtagtttaaaattcttgttgagcatttagagtgtagaatggatgactttgaattaaagttatattttcttttaaactatttttaatcatgttaaataggataatgatattttgctattttaaaaaatttttatctgttaaaaattcccactgaagtatttacaagtgaaattatctgaggctgggcacagtggttcacacccataatcccagcactttgggaggctgaggcgggcagattgcttgaggtcaggagttcaagaccaacctggccaacatggtgaaaccctgtctctactaaaaatacaaaaaattagccagaagtggtggcacacccttgtaatcccaggtactcaggaggctgaggcaggagaatcacttgaacccaggaggggaaggttgcactgagcggaaatcatgccactgcactccagcctgggtgacagagtgagtctccatctcaaaaaaaagaaaaagaaattatctgagatctggaatatgtgttaatatatatcagggggaaaatctggtaaggaaatagataaaacagtgttgacaaaacaatcctggtagttcctcaaacagttaaacatagagttacatacaacccagcagctctatgcccaggtatataaacaaaagaaattgaaacatatccacacaaaaatttacacacaaaacttttcactgtttcaaaatgtgtcagtgtttatgagtgcaacattattcatagtaaccaaaaagtggaaataacccagatgtccttcagctgatgagtaaacaaaatttggtatatccatgcagtggaatatgattttgccatgaaaggaagtactgatagatggtacaacatggatgaactttaaaaacattatactaagtgaaagaagccagtcacaaaaaaagcagacggtatatgattccactgatgtgaactgtctagaactgggaattctacaaggacaaaaagtagattgattagtgacagcttagaattagagtgatgggggcatggcaggataggagggtatagttaaagcaatcagagtttcttaggttttggtttgtttttgttttttgtttcttttgagatgatggaaatattttaaaattgactggtaattgttgcatgtgtctgtgaatatactaaaaaccattgaattatacacttcaaatggatgaactgtgtggtatgtgaattatatctcaggaacgctatttgagaaagaaaatattgacaaaatgttgataattgaagttgcgcagtggaaagtggggactcagtattctatcccctccatttttgtgtcattgaaaatttccgtcataaaatgctttattaaaaaatgcccgaccaggcactgaggctcatgcctgtaatctcagcactttgggaggctgacacaggtggatcacttgaggtcaggagttcgagatcagactggccaatatggtgaaactccgtgtacactaaaaatataaaaattagctgggcgtggtggtgcacacctgtagtctcagctactctggaggctgaggcaggagaatcatttgaacccaggagacagaggttgcagtgagctgagattgcaccactgcattccagcctgggcaacaaagcaagactctgtctcaaaaaaaaaaaaaaaaaaaaaaaatgccaggtacagtggctcacgcctgtaatcccagcactttgggaggccgaggcaggtggatcacctgagaccaggagttcgagaccagcctggccaacatggtgaaaaccccgtctctactaaaaatacaaaaattagccaggtatggtggtgtgcacctgtagtcccagctactcaggaggctgaggcaggagaatcgcttgaacttgggaggcagaggttgcagtgagccaagatcgtgccactacactccagcctgtgtgacagagcaagactccatctctccatctcaaaaaaaaaaaaaaaaaaccttttaaatgaagtttaaagctgggcatggtggctcacacctgtaataccagcactttggaaggccaaggtgggtggatcacccaaggtcaggagtttgagaccagcctggccaacttggtgaaaccccatctctactgaaaacacaaaaattagccaggtgtggtggcacatgcctgtaatcccagctactcaggagactgaggtaggagaatcgtttgaacccgggaggtggaggttgcagtgagccaagatcatgccactgcactccagcctgagtgacagagcgagactccatctcaaataaattaattaattaattttaaatatccaaaatatatatgtatttggtttaaaacaagactggtttttaccttgtgttacttcaagagagatgcacagagttatatgacttactagtcacgatgcgttgttactcccatatgaaagcacttccatttaccagtggagcacatagtttgcattatgcttgtcaaagctattttcatcaagaaatgctatctatgtgtctccttgccaacatctttgcagagtttacaactttcagcaatttattggcatcaactatgcaatactgttaagcagctgctgtacagctgagctgttttaatatgccaccacttatgcaaatagttaatattaaatggccaagatgcatgcttttggattcaaaagaacagtttatctctctcatagagattgtttatgcagtcgtcatcatcatcatcatcatctggaaatttcacaagaacatccttgcccttaactcttcaattttgaaaagtaattattatactgcaacatagtttttgttatttagtttttagttttagtccaagtttcagttgtataatcagatgcaattcttcatttgttaatgttaatgaatggttcgttcattcatatagtaatggtaattttattatgtatttgatatactagaattacaacatgtactgttaactttctgcaagttagtataaaagcatatcagattttatcagactacgttatagaatagtattgaaacgtttcagctggccagatttggtggctcacacctgtaatcccagcactttgggagcctgaggcaggtggatcacttgagcctaggaattcaagaccagcctgggcaacacacccccatctcaattttttttttttttttttagatggagtctcgctctgtcgcccaggctggagtgcagtggcacgatctcggctcactgcaacctccacctcccggattcatgccattctcctgcctcagcctcccgagtagttgggactacaggcgcccgccacctcgcctggctaattttttgtgtttttagtagagatggggtttcaccatgttagccaggatggtcttgatctcctgacctcgtgatccacccaccttggcctcccaaagtgctgggattacaggcgtcagccaccgtgcccagcccccgtctcaatttttttaaaactgtctcagctgggcacagtggctcacactttaaatcccagagctttggtaagccaagatgggaagatagcttaagctggggagtttgaggctgcagtgagctacagtcgcatcactgcagtccagcctggacataagagtgagaccctgtctcagtcaatcgatcaatcaatgtcttaaacaagtggtaaaaggaaaagaggattgagggaaggcacttttacagtttttgaattttacaatgaacaaataatatttctataaatttaaaacagaatttaaaaaatattttgaaaataactttctaaattaatgaagcatctgccaggcctaggctagaactgccagaatgaaacgaagctctagattagaatactctacattttgtcattttgagaagggagcttcctttctgcctgagaaccttagggtaaatcctgctacacaaattatcgcatccacgtacacagagattgtactcaatggtgtcattaagatgaatagccccactttgggatgccgaggcaggcagatcacttgaactcacaagtttgagaccagcctgcgcaacatggtgaaaccccatctccacaaaaatgaaagataaaaaaataaaaaaataattagccaggcatggtggtacatgcctggagttccagctgccaaggaggctgaggtgggaccattgcttgagcctgggaggcagaggtgagccaaaatcgcaccattgcactccagcctgggtgatagagccagaccttgtctcagaaaaaataaaaaaggccataaggcagaaagaaaacatgtgagctggtcctttattcataaatgggatcacacaaccaaaaactatcagaaactggaagaaaaagcatagaaggaaaaaaatagcaataaacagataaactgggggaaaaacaaattctggagcagaaaagaacttccacattgttataattaatttcttcagaaagatttggaaaagtaatatttccctaatataaaaatcagtaggccagatgcagtggctcacgcctgtaatccccacattttgagaggccaaggcaagtggattgcttgagtccagcctgggcaacatggcgaaaccccatttatacaaaaaaatacaaaaataattagccgggcatggttggtgcatgcctgtagacccagctactcaggaggctaaggtgggaggatcgcttgagcccaggaggcggaggttgtagtaagccaagattgtgccactgcactccagcctgggcgacagagcaagacctgtctccagaaaataaaaataaaaataaaaataaattgtgatattttgaagaattgcgaaartcaaaatcatgaagtaaataaagtataagtaaaactgccaatagagggatataggaaaagttaaaccctccaaaaacttagaaaaaggtaaaaagatggaaagccaaaggacatagaagattctcgcaagaaagaaaatacctacaaggaaataaagaatcaggatggcatcctggctaacacagtgaaaccctgactctactaaaaatacaaaaaattaggtgggcatggtgacgggcgcctgtagtcccagctactcgggaggctgaggcaggggaatggcgtgaacccaggaggcagagcttgcagtgagccaagatcacggcattgcactctagcctgggcgacagagcgagactccatttcaaaaaaaaaaaaaaaaagaatcaggatggcatcagagttttcagaaatttgattttagaagacagagcagtaataccatgaaagcatgtttcttttacagcaccagcaccctctcagaacattaataaattgtatgccatcaaataacaaacagaatgagggaggaaggagttcaagactagcctgggtaacacagtctctacaaaaagttaaaaagttaactggggacagtggtaggtgcatgtggtgccagcggctcaggaggctaaagcagtaggatcccttgagccccagagtgaaggcactgtggtgagccatatttgcaccaccgcactacagcctgagcaacagagcaagaacctgtctcaaaaaaaaaagaaaaaaaagggagaaagggaggtagaggccggargcggggaagggagagaaagagagggaagtggaagaaatagtggaacttgccaaagtgtacaataaaaagaaatttcagtcttaaaagcagtcagtacagaattaatctcagcaaacaacacgattaagaagctagataatattaggtaataaggaaaaaggcgtacattgtttctatcaatgagaaaacaaaagggcagaaactctgaaaagaggggaaaaaaatatttgttggaaagttgaagtacaaataggaacctaaatcaatggcatgatttttgagcagtagatacagtataagaaaaagaatccagtcaaacttagtacttaaaacattcttctttgagcatcacagtttccttttctgtagtcacattctctgcaataaacaatatttacaaataatgaggcaatgctgcaaataaacccactgaccaatcagaaaaatgatagttatagaagaggaaagtagaatcaaaaggcagggagatgagatgccaaactcaaatgcaaacaatgagagcggaatctgaaatacgagatgaagccaatacccagaagccagacacaggataagaaccgaaccaggttagaagcaaagcagagggcttcaaaatgatttcatcttaccaaaggatttctcttcgtagtgacaaaaatgttttctaattattgcctgttatgttggattgtttcctgtttgctttgtcagtttgtgaattgggatctcatgaatcatgatcatttcattgtaatagtagcatcaactaggataggacaatttatgtcaaaaaggtcggtgtaagacatattcaaatactttcatggctgtgaacacttaatataataaagaggttcttgcggacaggtgcggtggctcacacctgtaatcccagcattttgggaggctgaggtgggtgaatcatgaggtcaggagttcaagaccagcctggccaagatggtgaaaccccgtctctactaaaaataacaaaaaattagccgggcatggtagtgggcacctgtaatcccagctacttgggagactgaagcagagaattgcttgaacctgggaggcagaggttgcagtgagccgagatcacaccactgcactccaacctgggcgacagaatgagactcygtctcaaaaaaaaaaaaaaaaagttctttctaattttgttttcccttcagcatgatcccacgcctatctccaagaatacagccagaaaaatacatcattcattaaagagtaaaacattaaaacagtgcgacatgggtgcataaatagacagactgtagaaacagagttttaaagtccataaataaataatatacttacagcagtttagtacattataaagatggcatcagtgggggaaaaaatggtctcttcagtacatgatgttgttataggagagccatcttgaggggacagatgttgtattcatatgttttaccataagccaggataaactttaaaccaatcaaagatctatatgtttgaaaaagaaaagaggctgggcacagtgactcacgcctgtaatcccagcactttgggaggccgaggcgagtggatcacgaggtcaggacttcaagaccagcctggccaagatggtgaaaccccgtctctattaaaaatacaaaaattagctgagcgtggttgtgggtgcttgtaatcctagctactctggaggctgaggcagagaattgcttgaacctgggaggcggagattgcagtgagccgagatcttgccactgcactccagcctggatgacagagcgagactccatctcaaaaaaaaaaaagaaaagaaaaaccacaaaagtaacttaagaaaatataggaaaaaaacatggagaagaccacagaagaaaagattgacatattctgctacatcacaatcaaatgttcttcataacaaaaaaaaaaaagcgggggggggggggtcataaacaaagtcaagtaagaggtaaactggaaaaattgccactcatattaaagacaaagggctaatttccctaacatataaagagctccttgaaatgtataagaaaatgaccactcagtagaaaaatgggccaaggcaatcaactgaaaaaaaaccttcaatatattaaaaaaaaaaaaaaactgctcaacttcactgtaaaaggaatgcaaaataaacatacacaaacccttatcagactggcaaaaatcctaaaaggtaacagaagcttacattttatcaattataaaactaaagctcattgaactagattaggcagcctaagtttaaacaataataatgtcaagaatagatgtgtcgtttgctaatagctttatactaaaatagtaccactacatgtgcttagccaggtgcagtggctcatgcctataatcccagcactttgggaggccaaggctggagaatcacttaaggccaggagtgagagaccagcctgagcaacatagtaagacctcatctctaccaaaaatttaaaaattagctgggtgtgggggaatgcccctgtagtcctagctactcaggaggctgaggcrgtaggatggtttgaatgaactgtgatcacaccatagcactctagcatggacaacagagcaagaccctgtctctaaaaaaaaaaaaattgaagtggaattttcttggttcaaatttaccatcgatataagttggatcattatataagccaaacataataaaattgaaaatgtgttctaaatgttatttgggtacccactgtagctgtattatcctaataagaattttacagaattttgctgatcttaaagtgttctttgcctggatttcagaaactgctaatattttttgtacagtcacattaacgaaagtggtactgtgacaacaccccaaactggggtgatcttaggataaagcaaagatgtgaatttcccttctaatctcctgaccactaaacccccctttaccttatttatctgtagaatagtgctagattgttttggaggggatttttgctcttattttatcttcatgccaaagatagaaaagttgtggctaataaagagatgttctttcagatagaaagtttttcttttcataggctttcccttctacttatcttggtaagtagaacaggagctgaaatctaccataacaccatacccatttgacatcaaatcaataattatatacttcaccatagtggagcatataaatgaaacaacataatcttgaaagcaaaaagagtccccaaatggcccagataatcatatatcagattggcaatgtctgcaagtatatgcattctcatgtacattggccaagccaggcccactactgcagaaaggagaaaggattctgacaccatttcttctgacacgtctcgcagccctaaaatctattaaggttatatggcttaaactcagcaacactgctttaaaatactcactcaagttagatggttctaaatagaactaatgacagccagaagagaaaggcctgtaggaacttgctgtgacacagagctggtgtctataaacagattagtagaagagagcagaacattgttctatcaccataactttcgtgttttggcatgaagatacaataagataataggaaaaaattacctgttacatagcctaccactgttctgttctgataaataaagattaagaagagtttagcctgtcatctctccatatacttgtatatgatgtatcaatttagtaattaatcataaatacccactaactagtgttatgtactaaagatttgtctatggatatgaaagacaaatacacttgggagcaagaacgggtgaaatttttgatctcttcaaaaagttcatcacaattaattcttagttcaaagggcaactgaagccaaccccacttatcatttgtaaaaggataagggataatacagctaaagaaatcctgaatctgtattaaacttactgtttaactgctgactagtagccaagattggattctttttctctaccatctttatataagaattcaaaggaaatgcgacagtttaaaagaagaagagaaaaagttaaatgcttaaatagtctactcagcgaatatatgtggagcatctacagtggaaggtagctatgccagtggttcccaaatttgtctgtctattagaatcacttgagatcttcaaaaattccaaaatacaaaaaaattagctgggcgtggtggcatgcgcctgtagtcccagctactcaggcactgaggcaggaggatggcttgagcccaggaggtagaggctgcagtgagccgagaccacaccactgcactccagcctgggtgacagtgagatcctatctaaaaaaaaaaaaaaattccaaagcccaggccacaccacatcaattatctcacagtctctggggttgggacacagtcatcactggcaatatttgaagctccacaggtgatttcagtgtgcagaaaaacgtggaaaccactagactatagaatgttgtaattgtcagttatattaaatgagtattaatgatcaaaagattcatgtgcatgattctaattactattttattttcacaacttatgtgtgtagtataattgtttcttctacttaaaaatattttaatattaatcattattagtctgcttgctaaaatcactcttgctactttcttctgttttcatatatcaacaggaattggcagcaatgaaacagattctcgttaagatgcatagtaaacattctgagaacagcttacttctcactaaaacagaaccaaaacatgtgacagaaaatcagaaatcaaagactttgaatgtgcctaaagagcatgaagacaatatatttacacctaaaccaacactctttgtaagtacaatttttaaaactcataattttaatattcctgattcttactaaatgkattttagttaattttttccttttacatttatgaaatgagtagattccacaaatatgtttcatgaaaagaccttgaaggatttgcattaatccattttctaaatgtgtatattacctatcttatagatgatagtatattttactgtaattcctcataaagtgtgaaatcaattaacataaactgaaatgcattgttagctaaaaatatatgtgcacagaaattaaagaaaaagaaataagaaaaatttggattaaaaggtaaaataccaaaaatatgtacagttattatgtgccaatttttaaaaatagagaaaataaattaggaaatattgaaaactatatattttaacaaataataagaatcaagattaaaaggcaagagaattaaaataggagtaacattattaaatattccattttacttcaaatggtttctcaatcatgctttcatttctcaggagaaacatgatttttatctgctaaacatagagactcaaaaccagaaagattttctctgatattctgattcagtgagtccccagaatcttaatttttttaactcccaagttgaatataatagtcaaatatgagaacttctgatctcagtcattttattatacatgcagataatgctactgaagattaataggatgaaagagattttttagtgattatataattcaacctccctttttaaaaaaatgaaagttgcagtttagatcaaataagagacaattgggcagacatggtggctcacacctctaatcccagcactttgggaggccaaagtgggaggatcacctgaggtcaggagttcaagaccaggctggccaacatggtgaaaccctatctctactaaaaatacaaaaattacccgggtgtggtggcacacgcctgtagtcccagctacttgggagacaggcaggagaattgtcggtgcgatggcaccactgcattcaccaccttggcgagagagtgaaactctgcctcaaaaaataaaataaaataaaataagggacaattattttaaggatacgtgtggcagtaatgtagactaagctgacaggcgggagaaaacaggatggctcagttgactagcctggacacaaggcggctgagtccatgcatcttttcctctgtagtacatcagcttctctttgtttctcctctagtttctgcttactcatgttttccacttcctcattaacttgctcacagccctttgtsttgaaacaggtttctgtacatcctttctgcatctactctcttataatgtagttctccctgtattttccaagactaacaatctaattggcatagctaattcttgttgggtgatacccctttttggcaagacttcctaagcttattacccagcctacagaatggctgcccttaatggtgagcaggagtcacacagttccaaatacagctgccgaggactgtttattaagggctatggctaggcaggttttgctcagagagtgggcagagattgtggcagacactatgctgtgtctattataatctataggaagaaagcagattgaatacatacacattaatgggaaatagggtcagatgaaaaccacaagatacagctgaatacttaaagcctgtcagcactctctgatctgcctttctgatcctactctgctccaggcagtggcactattccttctgaccctgaccttctgcatttctagctttagcttggtaacctgattgtgattttctggaataccggctataatcaatcagtacatgagtaacaataagatttccccagtacctccagataaggttatgcagtgatgataaaattaagaagattcaatattagttgggtagttcttccttccttatttttgcttatctggattttctattttattctacaataaaattctttttaaataataataagggaaatttttttcaaaagaggtacaagctcagctatgtcctaatgaaaactgagaggtaatactacaaacaagtcaaatcaaagactgtaagctaatgcagaattagtaaggtgaaccgactagataacctggggcaaatcattaaatgttctcaatgtgttcttatctataaaattaagtgggaggttataatgaaatgagttctggactccttttattctagcatgctatgattctcttcaggcatcataatttttagttattcttttgaatattttcaattttccataagaatacttttttatattttctctgaacttgttgataaggaatttaccaygctaatatttgaagtaagagctaatcattttataatctcatggttttatacctaaaatgaaaacatttctaaatccagatcctttggctgaaagtatttgctataggtattttcccctgatagtaaattcagtgatggatgggtggatggatgagcgtttccatatgcattgacaatatgaggcgagccacacaaaactactgttaactgggtaatggagtgggagcagtgctgtgacgcagaggaggagaaataagagcttgacyttttttttttttttttttttttttttgacacttaggtcttcttctgaagactttttttttttttggagatggagtctctcactctgtcgcccaggctggagtgcagtggcgtgatctcagcttactgcaacctctgcctcccaggttcaagtgattctcctgcctcatcctcctgagtagctgggattacaggcatgtgccaccacgcccagctgatttttgtattttcagtagaggcaaggtttcaccatgttggtcaggctggtctcaaactcctgacctcgtgatctgcccacctcggcttcccaaagtgttgggattacaggcgtgagccacagcacctgacaagactttttttaatgtgcttttttatatgtatacaaatgttttacagtgtacaagtgatatttacatctgaaggcaacctcaaaattcccttttttagaaaagctctggcctttgaaatgacatatgtgacagagtcattgttcaggcacttagtgtaccaacaaaaactaattgaaccacagaatgtaagtgccttaaggacagaaactgtattccttttgttttgcatagcatctgaacaaagcagatactcaataaatatttgctgaagagaaaaaaaggagttatttgtctccccagtttagttatgttcttagctgttaaaactctaaactgggtggggaactttaatgttaaagtaaactacagggagaatgaaagcttcacctcccatgactctagttagtgctacttctgcaacaggcaacttaagtcttctttattcagaaacacccagttcattcccactaatcacctactttcactcttaaggtagctttttgctgtgctatcccttttttcccagcctcacttatctctttcttagaaaaacctagagctattctaatctgatttagaacaactttcctctttccttcctgagcagtatgggactcttttgctgcttttctgctgccatcctattcgaaaatagaatttatactcaggattcacatcattgtcattattttctcaataccttattaaaaatgcagatactagcaactctacttttagtcttttcaccaagtagattgtaagcattaaaacaaaaaagagcttgggcgcagtggctcacacctgtaatcccagcactttgagaggccgaggcagacggatcacctgaggtaaggagttcgagaccagcctggccaacatactgaaatcccgtctctactaaaaataccaaaattattcaggtgtggtggtgcatgcctgtagtcccagctacctgggaggctgaggcaggagaatcacttggacctgggaggtggaggttgcatgagccaagatcatgcctccacactccagcctggacgacacagcaagactctggtctcaaaaaaaaaaaaaaaaaaaaaaaaaagccttaggctctaagtatggtagcaaacaatacgattgtgcacctccagtgtatagtgtgtgaagtgtctgatttttggtgagtttacgacgtagttcaggccttgacttacatttgttatctcattggctagcatatgttgtatagatagattaagtttatataattgatacataagtggttatatgaacgacatgattccctagaagagctttggaaagctatatgtcatctggaaagaaaaaaaaattttttttttttttgagacagagtctcacgctgtcgcccaagctagagggcagtggcatagtcttggctcactgcaacctccgcctcctgggttcaagcagttctcttgcctcagcctcctgagcagttgggattacaggcacatgccaccatgccccgctaattttttgtatttttttgtagagacggggtttcaccatgttggccaggctggtctccaaactcctgacctcagatgattcacccaccttggcctcccaaagtgctgggattacaggtgtgagccaccgcacctggcctggaaggaaaattagtgtagtcaattcaagaagcatttactgactatatgcaagagcctgtgatgatcattaagacagcatcagcattaaaactgctgctcctataggatcaagcttagtaaacaataatataaggcaaaatcagttagcctactttttttgttttatttttgagacacggtcttgctctgtcacctaggctggagtgcagtagcatgaacacggctcactgcagcctcaatctcccaggctcaagtgatcctcccaactcagcctcccaaatagctgagaccacatgtgcacaccaccacacccagctatttttctttattttttgtagagacagggtctcactgcattgctcaggctggtcttgaactcctgggctcaagcaatcctcccaccatggctataatctcaaagtgctgggattatagtcatcagccactgcacctggcctgggtatcctactttaaaggaaatacaaattgctatgaaaattcagagaaagaatagacactgtggttttggaggactctaggttgccttgtcagaaaggaagtatttgagcttggctttaaagaatgcatggattttgacaagtgaagatgagcattatttagaaattccaagagcaaagaaaatatgatattggccaggcgcggtggctcacgcctgtactcccaacactttgggaggccgaggtgggcggctcacctgagatcaggagtttgagaccatcctggccaacatggtgaaacctcatctctactaaaaatacaaaaattagccaggtgtggtggcaggcacccgtaatcccagctactcaggaggctgagacaagtgaatcacttgaacccaggaggcggaggttgcattgagccgagattgtgccactgcactgcagcctgtgtgaagagcgagattctgtctcaaaaaaaaaaaaagaaagaaaagaaaagaaaagaaaatgtgatattcacaaaatattttctaacttgtgctcctttttaattgttgaagaataggatgtctaatatgtattttctatatctagactttattcctttcttactatattcttacgtctgactttggccaattcactatctgttaatcctttcccatagtacaaaagggaaataaaagtagataggttatacctagtcacattaatagagacagaaagtagagtggtggttgtcaggggctagggggtatggggatttattgtttaacaagtagagagtttcagtcaagcaagatgaaaagagttctatggatggacagtagtgatagttgcatcgtaatgtgaatgtaagtaataccactgatatgtacatttaaaaatggttggccgggcactgtggctcacacctgtaatcccagcactttgggaggccaaggtgtggggatcacctgagatcaggagttggagaccagcctgaccaacatggagaaatcccgtctctactaaaaatacaaaaattagccaagcgtggtggtgcatgcctgtaatcccgaggctgaggcaggagaatcgcttgaacctgggagggggaggttgtgatgagccgagatcacgtcgttgcactctagcctgggcaacaagagtgaaactccatctcaaataaaaataaaaatagttaatgggataaatcttatgttatatgtattttaccacaatcttctttttaaaaactttttaaagcctgggcaaaaacttttgtragatcctacctttaccaaaaaaaaaaaaaaaattttttttttaaattagccaggcatggtggtatgtgcctatgatgctaagctacttgggagtctgaggtgggaggatcacatgagcccaggaggttggggctgcagtgagccatgttcacgccactgccctcaaccctggatgacagaacaagaccctgtctcaaaataatatatataaaatgatgaaatataaaataaaaaataaatttaaatttttaatttaatttaaaaattgtaagtaggttacaaaaataatttttctcatttattcatgagggaaagtttataattttatcaaaaatggaacgtagcagttatttataatatagtaatataatgagtacaattggttgtgtttagacaagtgacaaggatgccacactagggtagcgtcatcacagaatcatgtcctaacactgtgcctcccaacattttttataacacacatggaaaattataatatttctatggcacaacaggataactgaacttgctggtagattgaagggactccagccaccccaggcactggggactgaggagaacaaaagctccacatacctgtaacacttctgtgtcatatttgtgtttagaagttctggtttcacttttttttttttttttttttgaaatggagtcttgctctgtcgcccaggctggagtgcaatggtgcaaactcggctcactgcaacctccgtctcctgggttcaagcaattctcccacctcagcctcctgagtagctgggattacagggacgcaccaccatgcccagataatttttgtgtttttagtaaagacggggtttcaccatattggccatgctggtctcgaactcttgacctcaagtgatctgcccacctcggcctcccaaagtgctgggattacaggcataagccaccacgcctggcccggtctcacttttttatgttgaatgtagactcatctcaccaaagtatgaccggacctcaaaatatctagctgtttacatatacatttttaaatattcattttttaatttctagtgtcaggaacactaattgtaacctcttcctgatgttatttaatttagctggtgagctaaactagaaatcaggaattttttggtgagcatggaacgaagctgactgatctcagacagcttcacattttgttagtgataaagccagatcaactgtcttaaactcacttaagttgggccctgcctatgaggacttctcaatatttacttatttgatttccagtttatatcttatttggaaaacaaagtaatgatatctaccagacatagattttttttccttagagaagtggtactggttaaacactaatagattcttaatttctagctctttttttagattacaggagtaatctgccaggcttactatgtctgcatttatcagtcatcattctttctaattttaactaaccctctcaatgggttataatccccatgttatatattaacgttttagctggctaattctgggtgacacagaagtatctatcttatcaattatttgtttccaaaatcaccttgtaacatagtaaattacttctggtaagtttccagttagtcttgtcatttgtttctgcaatggctttgtgctctctttcctaaatctggaatatagtatactttagggcctgttaatactccactaacaatttaaggtttttattaatttgtatacatatatatatatataatgtgtatgtaaaatatatatgcatatatagtttatatatatctgtaaagcacttcatattatgaagcctataagccttatatttaaaataaggaccctactcagttaaatggttaatcccattaatacctgaagcagaatgtcaaattttgtcatataaagcaccatcttatggatataaagggaagtaactttaataaaatagaaaaaagaaacactgctgatcaaagagctaaaagaatggaattatcaaaataaaaagcagttaatttttgtttttgtttttttttttttttgagatggagtctcactctgtcacccaggctggagtgcagtggcgcaatcttggctgactgcagcctccacctcctgggttcaagcagttctccaaaaatcagttaattatacatctgaattattttgctgtgcccattttaacaatcagttaccaagagccagcaaactctattgtatattctttgttcgtttgttttttaccttttaaactaggccaggcgcagtggctcacgcctgtaatcccagcactttgggaggccaaggcgggcagatcacctcaggtcgagagttcaagaccagcctgaccaacatggagaaaccccatctctactaaaaatacaaaattagccgggcgtggtggcgcacgcctgtaatcctagctactcgggaggctgaggcaggagaatcgcttgaacccaagaggcagaggttgcagtgagacaagatcgcactgttgcactccagcctgggcaacaagagccaaactccatctcaaaaaaaaaaaaaaaatgtcaaaaccattcttagcatgcaccccatacaagaacagaccatggaccatagtttactgatccatgatctatctcaggagttgataaaagcttagaaacttccagtgtttggaacagggctatcactaatggctagcacattactgactaaaatatctggaaatgaagaatatacattttatgaaaatcagaaataaacttttcagaagcagtattatctacttggaatctgttcaaattttggtagtgatgagacttacatactaatgtaggtgagaaatcactctgacatactctatgctaatgtaattaacagagaacctgaatttcagagaataatataaccgaaggaaaaagttcaccaatcgaaggattgaaaatatctttgaatgatataagtaaatttgagttcatacagcaaaatatgctgtttccatgccttactggttatttaccatttccactcaaaaatcaggctgttgcttagaatcacaagtactacccctgatgcttgtaaagggtgatgttgcctgattagttaaaagcatattattgcattactgtagtagaattctcttttgtcttgcatagtagaaaggcttgaatagactcacatgaaactttatgcccagacttaaatagaactgaaaggcttctgtcacagcagacccaaacattcattcattcattgaaaaatgtttattgagcacttactttgtgccaagtactattccaagcagtagagatataaataattcctgcctctgtggatcttacattcatggatagagatagactataaaccgacaaacaaaaaaataaattgaataagatgtgaaaacatgacaaatgctatggagaaaatgtatgaggtaactgagaagtcctcgatttgcccactttgcaaaattaataaatggctagaacctgtgctttaaccactgtactatacggtgctcaaaccacaaaaatcaaagaaggcatgacatcgaacacctactgctggcgagacacttccctgcatgctgaagatacaacatgagataagataaatggtataaactaagagtataagagtcagcatctttaggaattgtgtcccactgctagttcagcagctttagcaaattgttcagtctctcacatacaggcctggagataactatttcaggacaagtatgtggccctatgaagtcatcaggaacctagattccctcttcctttctcttcaaccatccttagagtgtggcatctgttcttagaatcacaatatggttgctctggcctcagccatcatgtctgcattttaagcrggaagcgagaaaaagggaggaaaatagtctccctttccaaaggagtttttccctaagtcctacccaacatcttcagcttatatcccattggccagaacttagtcgtgtggccacacctagcagcaaggaaggctgataaatgttttatacagggtgaatctattgctttactgataaaatcagagttctgttattaagaagggtgaaatagatataggctagacagccagcaacctctgcacttgatctcagccaaaaggtcgaggcgtgatcccagcagcctctgtaacagggtttgattcatttttatatacccagaacctaacacaaggactggcacagagtagttagtcaaataaatgctattaaactaatcccaagtacaaataattgagttcatgttggagagtgtcaagaaataggattagatatgtaagtatgggccagatcctaaaggggccagtcttctaagtgaaatgtggttagaacatgacagtgatggtgaagttcacccaaaataacctgggaataaggaacatatcttagtcctatgggaacagactttgaaattaaaatggttgtgataagacatctgaaaagtcaccctatgaagtagcaaggcagttaatccccaagacaaggtacacttgactgtggcaaatctgtctcattaacaggaggagaaaacatattaggggtgggagtaatggtctgcagtgtagcagacacagataaaaggagagtcagaaagaactgtctgccattgaaattcttataccgtcctttttgagtattaagattcctttttaatgccaaagtttttatttaccttctccctgtaaacacatagtagtagtaaaaagtttagtatcagttcattgaggaaatgcaaatgtacaaaccaattctgcatcctttggtataatcccgaggatctgtagcttagtttatagcagttgctttcacctttttggccaggagtcacagttgagaaaacaatttacgttatgacctagtaatgatcacacagtttctcaaaacagaacttacccccactatggccaatactctaatattttctatgctagttttttttttttttttttttctaaattctgttcttttacctactagagttcattacccgtgggttgggacctgcaatttaaagaacaatggtggccgggtgctgtggctcacacctgtaatcctagcactttgggaggccgaggcaggcgaatcacctgaggtcaggagttccagaccagcctggctaacatggtgaaaccccatctctattaaaaatacaaaaattagccaggggtggtggtgcatgcctgtagtcccagctactcgggaggctgaggcaggagaattgcttgaacctgggaggcggaggttgcagtgggccgagattgcgtgactgcactccagcctgggcaacggaatgagacttcatctgaaaataaataaataaataaagaacaatggcatacatgttcttctatgaccaagaatagtgacagccctagacttttagctggctcacctttcccagtcacccaaatctatctgattgtataagaatcatgcaattccctagttttactctgacttttccttatcttaacaacaaataaaagctgagctggaaaatcattaacttttcttttttttttttttttttttttttttttttgagacagagtttttcactctttgttgtccagggtggagtgcaatggtgtgatctcagctcactgcaacctccacctcccaggttcaagcgattctcctgcctcagcctcccaagtagatgggattacaggtgcctgccaccacacccggctaatttttgtatttttagtagagaagggtttcaccatgttggccaggctggtctcgaactcctgacctcaggtgatcccccccaccttggcctcccaaagtgctgggattacaggcgtgagccaccacacccagccaacttttcttaaatacataagagaagtgaggtcacaaagcaaactgctgcccccaaaattggacagataggccaatacagagaatgatgatgtatcagagcaaaaaatcccatggatgggaaccagtgctggggtaggaaaacctgaatgtaactgctagaagttaggtatggacaagtctgaaagttaaaaactccagtcatagaaggaacccccacactcttgtgaattttaactttagaagcttgacctagttcttacagtaaatattgggagaaaaatccccttccgtttccagcagtgggagggaaaaaagaacattttgaaatatgttagagaactcagttctcaacaaggtctcccttcaggagaagctattttaactagaagctaccctgctggggctttatcaaagcctaactgacctgggaaaaactcaatacccaatccagcccacctagccatcatggcccacctaagaagggaaaaaaaactgagaaacgtgtgtaaagttcatattccagaggcacactctaactgaaagactgagacctaatcataggaccataggatgacttccctacccccacaccttaccaccacattaccaaaggcccatttacggcagtttctttttcccagtacagtatgtccagttatcaggaaaaacttaaccaggtagactaaaaaccaaaaaacacagtttgaagagacagtgcaagcatcagaaccagagtcaattgtgccataaatgttggaattaacagacagagaacctaaaacaactatgattagtatgccaagggctgcaacagataaagtagacagcttgcaagaacagatgggcactgtgagcagaaagatgaaaatcctaagaaagaacccccccaaaaaggagaaatactagagatcaaaactgcttataacagaaacgacaaatgctggccgggtgcagtggctcacacctgtaatcccaatgctttgggaggccgaggcgagcagatcacctgagatcaggaggtcgagaccagcctgaccaacatggtgaaaccccatctctactaaaagtacaaaaactagctgggtgtagtggcaggcacctgtaatcccagctacttgggaggctgaggcaggagagttgcttgaacctgggaggccaaggttgcagtgagccgagattgtgccactgcactgcagcctggacaacaaagtgagactctgtctcagaaaaaaaaataaatgacaaatgcatttgataacctgattagtacagtggacattgctgaagaaagaatctctaaccttgagaatatttcaggccaggcacagtggttcatgcctataatcccagcactttgggagtgtgagaggatcacttgaacccaggagttcgagttccagaccaaccttggcaacataagagaccctgtctacacacacacacacaccaaaaaaaacaaaaaaaaacaaaaaaaacacttagccaggcactgtggtgcacacctgtggtcccagcaactcgaagagctgaagtgggaggatcgcttgagcccagaaggtcaaggctgcagtgagccatgatcatgccactgcactgtagtctaggcaacagagcaagaccctgtctccaccaataataataataataataataataagggtattgtaacagaaacctctaaaaaagagaatatccaaggactaaaggatgactacaaaagctatagcatatatttaatgagaatattagaaagagaagtaagaaaggaagagaagaaatatttgaaacaataatgacagaatttcccccaaactaatgtcagacaccaaatatccaaggactaaaggatgactacaaaagctatagcatatatttaatgaaaatattagaagggccgggcgcggtggctcacgcctgtaatcccagcactttgggaggccgaggcgggcggatcacgaggtcaggagatcgagaccatcctggctaacacggtgaaaccccgtctctactaaaaatacaaaaaattagccgggcgtggtggcgggcacctgtagtcccagctactcgggaggctgaggcaggagaatggcgtgaacccgggaggcggagcttgcagtgagccgagatcgcgccactgcactccagcctgggcgacagagcgagactctgtctcaaaaaaaaaaaaaaaaaagaaaaaaagaaaatattagaaggagatggaagaaagaaaggaagagaagaaatatttgaaacggtgacagaatttcccccaaactaatgttagacaccaaaccacagacccagagaaagataaatgcaaaaagaaaaaaacaaaaaacgaaaaactatacttaggcatatcatttgcatatcattttcaaactacagaaaattgagataaagacaaaatcctagcctgggcaacatggcaaaaccccatctctataaaaaatataaaaattagctgagagtgatggcatgcacccatattcccaggtactcggaaggctgaggcaggactatcacttgagcccragaggttgaggctrcagttagccatgatcataccactccagcctgggtaacagagcaagagcctatctcaaaaaaaaaaaaaaaaaraaaagaaaaagaaaaaatcctgaaagaagcccgaggaaaataacaccttacctatagagaagcaaaggtaaggattacatctgacttctcagaaacaatgcaagcaaggaaagagtggagtgaaacatttaacgttatgaaagaacaaaaccaccaacctaaaattctgtaccctgcaaaattattcttttcagaagtgaaaaaacaaaaattgaaggaatttattccataacttttcaaaacagaaagcactaggcccagatgggttcactgttgaatcccttcccttcccttcccttccctcccctcccctccactcccctctcctcccctccccctttttcctccctagtagctgggactacaggcgcatgccaccatgcccagctaatttgtgtattgtttgtagagatggagttttgccatgttgcacagactggtcttgaactcctgaactcaagtgatctgcctgccttggcctcccggtgtgagccacagcacccagctaaaattgtacctattctctacaatctctttcattagatagaagcagagagaatacttcccagctcattttgcaaggccagcattgccctaattccaaaatcaaagatattagaggaaaacaaaactacagaccaatatctctcatgaatgtagatgcaaaaatctatgaggatttctagggcagtgaaaatattatgtgatactatatattattatgatactataatggtggatgcctgtctatagacatttgtccaaacccataaaatgcatagtaccaagagtgaacccaaatgtaaactgtggacctagggtgataatatgtcagtgtaggttcatcagtggtaacaaatgtaccattgtgctaagggatattaataatggaagagtctgtgcatgtgtggagccggagagtatatgggatatctctgtaccttcctctcaattgttttttaagacagtcttgctctgttgtccaggcttgagtgtagtggcatgatcacagctcacttcagccttgacctcctgggcccaagtgatttttttttacatgatgtcttgctctgtcactcagactggagtgcaataccacaatctcagctcactgcaacctccacctcccaggttcaattctcctgtctcagcctcccgagtagcttggattacagrtgtgcactaccatgcctggctaattttttgtatttttagtagaaacagggtttcaccatgttggccaggctgatctcaaactcctgacctcaagtgatccactgtccttggcctcccaaagtactggtattacaggcatgggccaccgcgcccatcgtcaagtgatcttctcacctccatctcccgtgttaactgagactacaggtgcatgccaccatgcctggctaacttgttttttcttttcgtggagatggggtctcactatgttgcccaggctagtctcgaactcctgggctcaagcagtcctcccacctcaacctcccaaagtcctgggattacaggcatgagccaccgcgcccagccaaaataggaactttgactggaatcagtgaagttctgaatgttttattctgtaattcacctcccctgcctttttctttctattctgtacagcctgtcgccttttaggctgaaatgattgagtaataaacccaagaagtactctggtaaatacttagaaattcataagatctaaaacacaataatttggatacagtaattatttaataaatatctattgagtgaatgaatatctrttatctatatagatgagacaactgaaaagaagtcatgtccttgatttttttataattctctttgaaaataaaatcaattcgtaaaataattgcatccccagaaaatcttaagtataggctttgagcaagaaaacacagttttttcyatcatatacctaccaggtgggagattatttatggcaaaagacaaagtcttcgcccttaagtatcctttctgaattaagaaaagcaattttttagtatagcttacataaaaaaacctcaatgtatatagttctctgagttgcctctcttgtcctccttgtaagcattttattggattttctttttctttttttaaacagactaaaaaagaagcacctgagtggtctaagaaacaaaagatgaagacctagtgttttggatgggaagcacctgtagaccattatatactcctgaagttctttttctgatggaaaacaaaattcagcttaatcgtgtactcagcattttttaaataacaatgtttatttgaactaatattaaattaacaaattcagtgtaatcaaaatgtgtaaagaacaatcaatatactttawttttttttctattttataaaataaatatatatgctatgctttaaattttggagctttcataaatgttcaatgcattttaagtgtgtggcttataaatattttggtgagtatttttctatactacgtaaattctgagtttaaatgtcatacacaaatactaagacactttgcatttttaaaaattaagaatcatttgtgaagtccactacgaggtacttcaaaagcccagtaatggtggtcagataccatgtagatggatacagattgttgactcttttgaagttgtttttttcttatattttatattaccattaaccaataaaatctggcagaaagtctgctattccattggtaaagtgaaaatttggtggaaagtctgttgctacatcagtcataacattgttggaccagatgcaatatggatcagatttctagtcagaaaaaaaatcaataggattttcttttgtcataaaatatgctccatttctcattgaagttgtatactttaaaagaacggaaggaggcaagagagaggaaaaaaggaaagaaatatatatatacacacacacatatatatgtatgtccaggtttttcaaccactattgacattttgtttgtttgtttttttgagacggagtcttgctttgttgcccaggctggagtgcagtggcgtaatctctgctcactgcagcctccgccttccaggttcagacagttcttctgtctcagcctcccgagtagctgggattacaggcacccgccaccacgcccagctgatttttgtatttttagtagagacagggtttcaccatgttggccaggctggtctcgaactcctgacctcaggtgatccacctgcctcggcctcccaaagtgctggaattacaggcatgagccaccacaccctgcccactattgacattttgggctggataattctttcttaagggtggacatagggtaaatcctatgcatgtcataatatataccagcatccctggccttcagcactagctaccagttacacccccaccgcaaccctagttttttggtttttgggttttttttcttttagagacagagtctctctatgttgctcaagctggtcttgaactctgggctcaagcagtcctccctcctcagcttctcaaaagtgctgggatgacaggcgtgagccacctcacctggtcccacccccagttttaacaagccaaaaatgtcctggatgaagactagggttccttctacctcttggccattgtgaattgtcttactttttaacccttacctcatcttctcctggtcatggattttctatttatctatctgtttatctatctatctatctatctatctatctatctatctatctatctagaaacagggtcttgcactgtcacccaggctggagtgcagtggcatgatcatagctcaatgcagcctcaaactcctgggcaaaagggatcctcccaccttagcctcccaaatagctggaactacaggtgcataccactacacctggctagtttcttttaaacttttttagagacaggggtctcagtatgttggtcaggctgggctcaagtgattttcccacctcagcctccccagtagctgagattacaggtgtgagtcaccacacctggctcttacttaaaaataataaaaacaaaaattaatcataacattattttttcttgataaatgttttatgaaatgttgcccaaatgcaagtgtaatagccaccattatcaagctcattctgtcagccagttgctgtgttacatgctttctactctttatttaatcttcacagtaactctgtcaagtaagcattatcttcatttttaaaatgaaaaaaaccgagactcagtaagggtaactaaatggcccaagatcacacacacgataaatagaagtggatttgaaccaagttgctacgctctttccagtacacgacactgcttctcattgcttgcttcctatccctggctcccaagctcacttcaatagcaagaaatgcaggggaaatttttaattttttttagatatggtctcactttgttgcccagtctagtatcaaactactggccttgagcaatcctcccacttcagcctccagagtgagtagctgggattggaggcgcaagccaccctcccagcgaaaattttgttctatcaccttttctttgtgggtaggggggctatgggacttagcatagttgcattgtttttgctcaagataagttcatggttctgaaactttgtttttttttttgtttgtttttttgtttttttttttttgcagaagcttagcattcccatactcgtagttgaacccaggccacctgggtgaaaaaccaggaatcctaagaccatgtgggagatgactctaactcctaaagaattccatgactcttataatagttcttaccaggttaacaggatatactcagctttcagaaccaactaaatggcttgtattcactttattgattcatacattctttcattgaacaaacaagaaaaatctaaaatgtgtaaggcattcaaactatgtattgtttgtcttcttctcaaagggccctgaaaaagaattctatgatacctcaagcaccaaaggaagtttactttcatcatcctcagtatagaaatttccaaaaagaagtatcagctagtgacccaagtactccaaatgcactatatatataaagaagatgccacttttgctgatttcagtaagtcatacttggataatcatacatcaggaatgttaaggaagattcccacactttagggaggttgaagttgttaatgaaccagattcgcttttatgctaagatcctgagacagaaaggctactctatctcagtctctctctctctctctttctctttctctctctctctctctctatatatatatatgtatttttttttctttgagttggagtctcgctctgtcacccaggctggagtgcagtggcgcgatctcggctcactgcaacctctgcctcctgggttcaagcaattctcctgcctcagcctcctgagttgctgggactacaggcacgtgccaccatgtctcactaatttttttgtatttttagtagagatggagtttcacattggccaggccggtctcgaactcctgacctcaagtgatccacccacctcggcctcccaaagtgcttggattacagatgtgagccaccgtgcccagccagaaaggctactatattatatagctttgtggtagactcctgtgggcctcttagatttaacaaaggtaagaattcccacttaattatttgaaaaaacatttcacttttattaaaaatactgctgtttgaaaaaggtgcttctccagtggcattcagtattggtggcctggcatggtgggtactacccaatgaagactgtactatatatttataggccatacttatgaacacgtgtatatatatttatataagatctacctatctaggatggaaactcgggtgaaaataaaatagggtgaaggtaaaaagtacgtagcacttccagttgtgagccaagattgtaactagagagcagccaggagcttcctgtcagtaaccatgttttcaataaatactctttcatgtacaacaaataaataaaaagctgctgctcatatctgaaatgttctcaagtgaaactgatgtcaggaatttattttcccttgcctaatcttacaggattaaaatttgggttattggctgggcgtggtggctcacgcctgtaatcccagcactttgggaggctgaggcgggtggatcacgaggtcaggagagccagaccatcctggctaacacagtgaaaccccgtctctactaaaaatacaaaaaattagccaggcatggtggcgggtgcctgaagtcccagctacttgggaggctgaggcaagagaatggagtgaacccaggaggcggatcttgcagtgaaccgagatcgtaccactgcactccagcctgggcaacagagtgagactctgtctcaaaaaaaaaaaaaaaattggggttattgcaactttcccgctgatactggataggctagcagtggatattagcctatccaatatcagtgagaaatatattttattttcatataactcattttaaaaattaataaatactataaatgctctaaagaaagacttcctaaggcttagaggtcaccaacaaagctagccaactagtaccaagagtatcccgtggtatcatttactttggttgatttacagagctcacagtccagtcctcagctttacaggctcagaaatttaattttgttagtgcactaaagatgacacgtctttcaggagtgtgcccatatttactggtgcatagatcataatgtttatgtattacttctgagagaaaagtaaaactgatatacagaatatgacttattggaatcagcacacctggcatcttctctccctatttcctcctagcttctgccatactatacactcatatttttctccttcatcctcctctattacctgatcataaaacactgaatttttcagagcttttttccctctaagcctattcattccattctgtacttactctcagataatttctacaccctggcttcagctactaaatgccaatatttgcaaacgtacgtctccagttcagacggttccttttaaccacctgcctacttgacatttctacttggatgtcccattgtgacctcaaacttaacatgtattaaactgaactcaccaactttctcctccagtgttttcaatttcaataaatggtactaccatttatttactcagtgacttataccacaaaaccaggagtcatccaagacccttctcttgttaactaccagcattcaattaccaagccctgttgatctgcctcatatttttttttacttttgattgtgaaaatttccggccgggcatggtggctcacgcctgtaatcccagcactttgggaggcctaggcaggaggatcacctgaggtcaggaattcgagaccagcctggccaacatggcaaaaccccgtctctactgaaaatacaaaaattagctgggtgtggtggtgcatgcctgtaatcccagctactcgggaggttgaggcaggagaattgcttgaaaccgggaggcggaggctgctgtgagcccaggtcgtgccactgcactccagcctgggcgacagagtgagactctgtctcaaaaaaaaaaaaaaaaaaaacagaaaagaaaaaaaattttcaaatacacaaaacggcaaaggaaatgtcaagacaggatatattcattgtcttgattgcggcaatggtttaacagatatatacctttgtcaatatttatcaaattgtacattttaaaatgtacagttttgttttgtttttttgaggtggagtctcactctgtcacccaggctggagtgcaatggcgtgatctcggctcactgcaagctctgcctcctgggttcaagcaattctcctgcctcagcctcctgagtagctgggattacaggcacccgccaccacgcctggctaatttttgtattttggtagagacggggtttcaccatgttggccaggctggtctcgaactcatggccttaagtgatctatccacttcagcctcccaaagtgctaggattacaggtgtgagccacctcacctggccaaaatgtgaagtttattatatgtcagttgcacctcagtaaagatgttttttgaaaggaggaaagagggagagaaggaggacggtaggcgggtgggcaggcagtcaggcaggcaccatctagaaagccctgatgaagccaatgacttaacaaacatcaatgaatgctaaaacaattagataaaggataatagggaatattatatcaggccataaccacctataatcactagtcaaccttagtatcattaaaatgagacaaccagacattatgtgcttcctgatgtgatgtgatgtgatgtgaagtataaagcaatacatgtatagtatttttgtcaaaaattttaagattttagctgaatcaaattgagtcttcagatccaacttccaatctacaggcaaaacaagaaagagaaaatcaagctaaaagacgccaggaggaagcaattgactaaatccagaacacggaacattctgggcactgggaaggacaattgcttttaggccttccttattttgaggcatttttaataaagctgtaaaataatacgtttttaaagagagggaaaaactcatgagttcccactgatatatccaattctaatttgaaatttaaagatttcaattctctgattttacatgtgtgtttcatttcctgtgtgtgaattgttaacacaac

SEQ ID NO: 95577 - DNA, 62515 bp, Homo sapiens
ggtgatattctatcacttttttatttattcactggaattcttctattaaaaaattttcccagactgggcgcagtggctcacgcctgtaatctcagcactttgggaggctgaggcgggttaatcgtctgaggtcaggagttcaagaccagcctggacaacatggtgaaaccctgtctctactaaaaatacaaaattagctgggcgtagtggtgcatgcctgtaatcccagctactcagggggctgaggcaggggaatacttaaacccgggaggtagagtttgcagtgagccgagattgcaccaccgcactccagcctgggcaacaagagtgaaactacgtctcaaaaaaataaataaataaaaaataaagttttcccctatcaactctttggttactctgaatttcagtttgtgtaggaaagcaaaaaatttggtttaaaaactttttaaaagcaatttcagaataatgagttagtgccctagcaatcctcaatgtgaccagtgagaggtttaataaaagcattgaaatttatgtattttgaaatttttgatatatttcaaactacttcagtcaaaaaaatctttctgattctccttgatgctccaagtgtcccttcttttgccagtaggagctctttcaaattggactctgtatcattgcttacaaacacacacacacacacacacacatacacacacacacacacagtcagaggattcagaacacacatgtcttctgcttctctctaagaccccatctagttatcctcaactgctagtggatctgttcatattccaatggccaaaatgagtcacatagccacatgcaaaatcaccatgaggaagtatactgtgcccacactgaagccatgggaaggagagtgagaaataaaaatgttttaaaatcctgtgaactaacactactatctaccacattgaatgtgatggttaattttacatgtcaatttttctaggctacagtacacaatcaaacattaatctaggtcttgctgtgaaggtattttgaagatacatttaatatctataatcagttgactttaggtaaaggagactaatcttgataatgtgggtggaacttattcaattagctgaaggctgtaagagcaaaatctgagattactcagagaaaaagaaattctgcctcaagactgcagcatcaactcttgcctgagattccagcctactcagctgcccaacagatttcagacttgccagcttccataatcacgtgagcaaaatatttaaaatgaagggatggctctggtcagagcaattaaccaaggaaaagaaatgaaagtgttcaaattgggagaaaaaaagtataactatctcagttcacagattacatgattctatatatagaaatcctaaagaatatacacatgtaggcacacatacaaaattaatagagctaataagtaaatgttcagagtacaaggccaacacttgctatggtttgaatatatccccccaaaggacgtgctagaaacttaacccataatgcaacaatgttgggtggtaaggcctaatgtaagttgtttaggtcatgaggtctcaccctcatgaatagattaatgccaattgtaaaagaacttgaggcttcaagtttgatcccttgctctctagccctctctttgtccttccaccatgggataacatacataccaagtaggctctcaccagatgctagcccttcaatcttagaatcttcagcatccagaaccgtgagccaataaacttctgtttattatatattacccagtctgtagtattctgttacagcagcagaaaatagactaagagaataccccaaaatcaattgtgtttctatacatcagcaatcaccaatctggaaaattaaaaacaatttcatttataatagcatttgctaagaactaaatatgtcccctcaaaattcacatattgaagctcaaacccccagtgtcactgtatttggagatgggacctatataagaaggtaactgaggttaaattgatcacaagagtggagttctgatgctatagattagtatctttataaaaaaaaaaaacaacaaaaacgaccagatatctttctctgtgtgtttctctgtctgtttccctttccttctcccgcttcctttatcatatgagaatgcagaaagaaggtggctatctactcgccagtaaaagagccctcaccagaaaccaaattggcaagcaccttgatcttggactgcacagcctctagaactatgagaaataaatttctgtcgcttaggccattcagtttatggtattttgttatggcggcttgagcaaactaagatagattttgctaccaagaagttgcatgttgctttaataaaacctaaacatgtgaaagtggttttggaactaggtaatgggtagaggctgaaagaattctgaggtgcatgctagaaaaagcctagatttccatgctagaaatatggatgttaaaggcaattctggtaagaactcagaaatacagttgaagagaaagcctccatcttcttagagaaaacataatcatgaacacaattttggtaaatatatgtttgttaaaggccattcttgtgaggtctcagatggaaatgaagaatgggtcactggaagacagaagaaaggcagtccttgttataaagtagcaaataacttggctgacttgttttctagtgttttctggcagacagaatttgtgaatgataaaattgaatatttaactgagatttttaagcaaaatgctgaaagtgcgacctggatcttcctgaatgcttatagtaaaatgcaagaagagatgaatgaaagaagaaattattaagcaaaaaggaaccaagacttaaatatttggaaaattatctgcctgtcatgttgcagaaaatgagaaagtacattctaaagaaaacaccaaaggtatggttagactatcatttgataaataaatgatgagattatatgagcagaaacactgcctgtttcaactgaaggggatgcagacaagacaaaaatgacagaaggcttttacatgtcctagattctacaggacaggacaatagagctatctagctgctaactttgtactattcctttttttttttttttttttgagacagattctcactccattgcccaggctagagtgcaatggcgggatctcagctcactgcaactttcacctcccaggttcaagtgattctccttcctcagcctcccaagtagctgagattataggcatgcaccaccaggccaggctaatttttgtatatttagtagagatggggtttcactatgttgtccaggctggtctcaaactcctgacctcgtgatctgcccaccttggcctcccaaagtgttgggagtacaggcgtgagccaccgcacctggccaaacttgtgctattctttaagaaaaggggagaatgacctcaaagcaattcagatgttatcaaggccattacctagcaaaacttttgggatgaggctctgcctggaagagcatgcctggcagagtgtggggagaggtatagcatccacctagggtccagaaggcagggccaccacccttgtaggtctggaaggcagggcactgaatcaaaatggattattcttgagccttaaaatctactagaatttgccttgctagatttttggacttgcttgggacctgtcatcccttcctttttgcctatttcttttatttccttcctttcttgctcctatttttgtttgtttgtttgtttggaatgcctattctatgcctgttctgccattgtattttggaagcaaacaacttccctggttttacagtttcatagctggggagaaaatttgcatcaggatgaatcatatctcaagtctcacccttatctgttttaggtgatatttagaagagacttcggacttcagattttagagttgatgcttttgagactgttgaagtggtatgaatgtattttgtattcaataaggacatgaattgcaggggtacagaagtctgttgaccaaattatatctccacaaaattcatatatgtaaccccaaaccccaatgtcactgtattggagataagatctataaggaggtaattaaggtttaagaagatcataaaggtggggcccttatccaatagaattagttactcataagaagagacatgaaagctagtgtgcttgcacaatggattcttggtgatgacaccaaaagcacaagtaacaaaatagataaattagatttcatcaaaattaaaaaggtttgtacactgaaggatattacaaagaaagtgaaaagacaacctacagaatgggagaaagtatccaccaatgatatatctcataagggtctaatatccagaatatatgactacacataactaacaacaaaaacacaaacaactcaatttaaaaatggggaaatacctgaatagagagttctccaaagaagatatacaaatggctaacaagggcatgaaaagatgctcaagataactagccattagggaatgcaaatcaaacccacaataaaataccactttataccctttgggatggttactatcaaaggaatagaaaattatcgtgttagtgaggatgtggagaaattggaatcccccgacaatgctcttggtatgtaaaatgaatggttcagctgctgtagaaacatttgtttatgggttcctcaaatattttcacgtagaattactataagacccagaagttccactatgtttatacccaaaagaattgaaaacagggactcgaacaaatacttgtatacaaatgttcatatcattgctattcacaatagcccgaaagtggaaacaacccaaatgtccatcagtggatggacaggtaaaactgtggcatctaggtacagtggaatagtagccataaagagacatgaagtaccgatacatgcaacaaggtgtacaaggtgaacctgcaaaagattatgctacgaagacagaccaaaaggtcacacattccatttatatgaaatatccgtaataggtaccacagtttgaaagctgattggcatttgccaggggctgagagagggaggaatgggagtaaccacttaatgtgttcggattttattttggagtgtactttaatacacttataatgtgtgcaaccactaactctaattccaagacactttcattcattatgacccttggcattgtgaacggcaaataataaatgctcattaaaaagattcaccccaggccgtgcatgatggctcacgcctgtaatcccagcactttgggaggccaaggcgggtggatcacttgagatgaggagttcaagagcagcctgcccaacatagtgaaacagtctctactaaaaatacaaaaattagccgggtgtggtggtgcacgcctataatcccagctactccggagactgaggcagggagaatcgcttgaacccaggaggcaaaggttgcagttagctgagatttctccactccactccagcctgggcgacagagcgagactctgtctgaaaaacaaacgaacaaacaaaacaaaacaaaacagaccttacaatgtgtgctagtaatgcggtttctgaatttttagaacccttctctggggtggtttttttaaaaacataaactcattggcagttgatatactacagaaggttgtacgcattggactagtaaatgtaggtaacggtgtcgctgtttttccatttgtatgtgctaagcaaagagaaaagctagttctatgtttcttccactctagaaattcaacagggtcgtttttccccaaattcacatctacaccctccctcccactttgcggactcggactccaggattgagcagagatcctgggccccgcctcccgcccggacgcaagtctctgcgggcctcaccggcgtcctgcgcggaacgcagcgctccaggctcctggcagcggccccgccctcccggctcctccccttccgcccgccttccccgcccctcggcccagcctgccartcggaagtgcggccgccggaactggctgttggtgggggtgcagcactgagccgccgacggggcgggtgggctttgctgccgagcaggcggcgccgtcttggggcctagcggcgaggcgacccgcacaggtgggcggtggcggtaggtgggtggccagcgactggcaacgcggtggcttagacgcgcgagatccggccagggtcagaggtgagcgggccgcatcccagagcccgctggaggaagacggggtccccagagacccggcaggccggggcggaggttgaggcagctaaactccmggtggacgcctacatcgcctttcgcggtgttgctaagccgaacttttaattttagtttgacttttgggttccagagacgggtatttccggacactggcaagaattttgccttgcgtgtcttcgaaggcggttttcttggtgtccatattgcataaaggcttgtcgctcctctgtggagatgacggttgtacaggtaaagcctaagttgtgacaaaagctcctgcaatgggaagactctggtcgatcagggaaatcagtagaattgatagcaacgcgtagaattgatagcaacgcttagaattggattaattactggccatggttacccggcgctcagaaatgaacttggagaacagttgccctggaagccatctcccgtagccactgcgtagtgggggccgcgtcttcttgagtgcaattcatcaaagtctctagtaggactcaaaatataaagtgacgagcaggattttcggagtcgagtacagtgtacttgggttgatcaccatgttataaagttagatccaaattaagaaatacatattcgtctctgagcagaattgggtcctttttttaattgctttgctttttttaaagaaatgtaaaaacagatgccggtttgattagtttgcaggttgtaatattggaagggacctaagattggacacagagttctgaattctgatctaggtctgtgatgttaggaaagtcagttgttctgattgccttattctgtaaaacggaaatgataatgattacagtttcctcacaggttctagtaaattctgtgtatagacagaatgtttgctttgtgagagatatgaagttattagtttttgtctgaagtacttaaataatttaaagttagtaagccccyatccccaatttagtgacaagaaatcttaaagtcatcacattttgtccgaaaagtacatagtgtatcttcatcttcaaattcagtggtcagaaaattttcacgttcacctaaattcaacttaaacctcctacgagcttttcaagggtaggagtaatatcttactcattgtaaatgatcrtaaatcatttacagttgtatggtgcttgtgtttgtgttgtattaggaggttagtccattttttaaagtttcagacggagtttcactcttgttgtccaggctggagtgcaatggggcgatcctggctcactgcaacctctgcctcccagttcaagccattctcctgcctcagcctccggagtagctgggattacaggtgtgtgccaacacacccggctaatttttaatttttttagtagagactgggtttcaccattgttggtcaggctggtctcgaattcctgacctcaagtgacccacccgcttctgcctcttacaggcctgagccaccgccccagccaactttttttttttttttttttttgagacggagtctctctatgtcgtccaggctgcagtgcagtggcgcgatcttcgctcactgcagcctccacctcccaggttcaagtgattctcttgcctcagcctcctgagtagctgggatttcaggtgtacgccaccacacccggctgatttttgtgtttttagtagagacggggtttcgccatgttgtccaggctggtctcgaactccagggctgaagcaatccacctgccttggcctcccaaagtgctgggattataggtgtgagccactgcacccggccttctgtatttttttgtagagacactttccccatgttgctcaggcaggtctggaactactgctcctgggctcaggccatctggcagcctctgcctcccaaagtgctgggattactggcgtgagccacaccccacctggccctttccttttttttttttttttttttttaatggcttggcaaaaaacaaagctttggggttcaccaaaaatcaaagcaaaactgttttacctggaaaatcttgttttctgtcatcagaagttgtgctttagttcagctgtgtagacacccagtagtggttacatgaagttaggtgaatagattaaaaataatttttatttgtcatcagtctcagagcaaatgttttctatttatttttatttctaacttttttttttttgagacagggtcttgctcttttacccaggctggagtacagtggtgtgatcatggctcactgcagcctctatttcccaagcttaagtgatcctcctgcctcagcctaccgagtagctgggacctgtgccaccatgctggactaatttttttttcttcccttagtagtgacaagtctcactatgttgcccaggctggtctcaaactcctcagctcagatgatcctctcacctgggcctcccaaagtcctggggttacaggtgtgaaccaccatgcccagtcttatctcagagcaaatgttacgcaccatcctttgctaggcagagtgagcttcaaccctggcagcacgtttgactcgtctggggagctccaaaaatggggactgtgcctcactctagaccacttaatcagtctcaagcaggtgggtcacaggcatcccacagtttgaagctctgcaagttactcttgtgcagccaggataagaactcctgtagttatagaaaagaagrttttctttttttttttttctttttattatactttaagttttagggtacatgtgcacaacgtgcaggtttgttacatatgtatacatgtgccatgttggtgtgctgcacccattaacttgtcatttaacattaggtatatctcctcatgctatccctcccccctcctcccaccccaaaacaggccctggtgtgtgaagttccccttcctgtgtccatgagttctcattgctcaattctcacctatgagtgagaacatgcagtgtttggttttttgtccttgcgatagtttgctgagaatgatggtttccagcttcatccatgtcactgcaaaggacatgaactcatcattttttatggctgcatagtattccatggtgtatatgtgccacattttcttaatccagtctatcattgttggacatttgggttggttccaagtctttgctactgtaaatagtgctgcaataaacatacgtgtgcatgtgtctttatagcaacatgttttataatcctttgggtatatacccagtaatgggatggctgggtcaaatggtatttctacttctagatccttgaggaatcgccacactgacttccacaatggttgagctagtttacagtcccaccaacaatgtaaaagtgttcctatttctccacatcctctccagcacctgttgtttcctgactttttaatgatcgctattctaactggtgtgagatggtatctcattgtggttttgatttgcatttctctgatggccagtgatgagcattttttcatgtgtcttttggctgtataaatgkcttcttttcagaagtgtctgttcatatccttcgcccactgrttgatggggttgtttgttttttccttggaagtttgtttgagttcattgtagattctggatattagccctttgtcagatgagtagattgcaaacattttctcccattctgtaggttgcctgttcactctgatggtagtttcttttgctgtgcagaagctstttagtttaattagatcccatttgtcaattttggcttttgttgctattgcttttggtgttttagacatgaagtccttgccctcgcctatgtcctgaatggtattgcctaggttttcttctagggtttttatggttttaggtctaacatttaagtctttaatccatcttgaattaatttttgtgtaagggctaaggaagggatccagtttcagctttctacatatggctagccagttttcccagcaccatttattaaatagggaatcctttccccattgcttgttttggtcaggtttgtcaaagatcagatgkttgtagatatgtggcattatttctgagggctctgttctgttccattggtctatatctctgttttggtacaagtaccatgctgttttggttaatgtagccttgtagtatagtttgaagtcaggtagcgtgatgcctccagctttgttcttttggcttaggattgacttggcaatgtgggctcttttttggttccatatgaactttaaagtagttttttccaattctgtgaagaaagtcattggtagcttgatggggatggcgttgaatctataaattaccttgagcaatatggcgattttcacgatattgattcttcctactcataagcatggaatgttcttccatttgtttgtatcctcttttatttccttgagcagtggtttgtagttctccttgaagaggtccttcacatcccttgtaagttgtattyctaggtattttattctctttgaagcaattgtgaatgggaattcactcatgatttggctctgtgtttgtctgttattggtgtataagaatgcttgtgatttttgcacattgattttgtatcctgagactttgctgaagttgcctatcagcttaaggagtttttggtctgagacaatggggttttctagatatacaatcatgtcatctgcaaacagggacaatttgacttcctcttttcctaattgaataccctttatttccttctcctgcctaattgccctggccagaacttccaacactatgttgaataggagtagtgagagaggtcatccctgtcttgtgccagttttcaaagggaatscttccagtttttgcccattcagtatgatattggctgtgggtttgtcataaatagctcttattattttgagatacgtcccatcaatacctaatttattgagagtttttagcatgaagcgttgttgaatttcgtcaaaggccttttctgcatctattgagataatcgtggtttttgtcatgggttctgttcatatgctggattacgtttattgatttgcgtatgttgaaccagccttgcatcccatggatgaagcccacttgatcatggtggataagctttttgatgtgctgctggattcgatttgccattattttattgaggatttttgcatcgatgttcatcagggatattggtctaaaattctctttttttgttgtgtctctgccaggctttggtatcaggatgatgctggcctcataaaatgagttagggaggattccctctttttccattgattggaatagtttcagaaggaatggtaccacctcctccttgtacctctggtagaattcrgctgtgaatccatctggtcctggactttttttggttggtaagctattaattattgcctcaatttcacagcctgttattggtctattcagagattcaacttcttcctggtttagtcttgggagggtgtatgtgtcgaggaatttwtccatttcttctagattttcaagtttatttgcgtagaggtgtttatagtattctctgatggtagtttgtatttctgtgggatcggtggttatatcccctttatcattttttattgcgtctatttgattcttctctcttttcttctttattagtcttgctagcagtctatcaattttgttgatctttcaaaaaaccagctcctggattcattgaktttttgaatgaatctttccaccaaatattagaaacatatgtacccaaggagtgaggtttcgttttgtttttgtttttgttttttgtatcaaataggctagataatgtatcttttttttttttaattttagtttaagttctggaatacatgtggtgaatgtacaggtttgttacataggtatacatgtgccatggtggtttgctgtacctatcaacccgtcatctaggttttaagccccgcatgtgttaggtatttgtcctaatgccctccatcccctttcccccaaccccccaacaggccccagcgtgtgatgttcccctccctgtgtccatgtggtctcactgttcagctcccacttatgagtgaaagcatgtgatgtgtggttttctgttcctgtgttagtttgctgaggatgatggtttccagaatcattmatgtcactgcaaaggacatgaattcattcttttttatggctgcatagtattccatggtgtatatgtgccaccctttctttatccagtctatcattggtgggcatttgggttggttccaagtcttcattattgtaaatagtgctccagtaaacatacgttacgtgtgtatgtgtctttatagtagaatgatttataatcctttggtatatacccagtaatgggattgctgggtcaaacagtatttctggttctagatccttgaggaattgccacaccgtcttccacaatggttgaactaatttacactaccaccaacagtgtaaaagtgttcctgtttctctgcagcctcaccaacatctgtttccagactttttaatgactgccattctaactggtgtgagatggtatttcattgtggttttgatttgcatttctctaatgaccagtgataatgagctttttttcatatgttggccgcataaatgtcttcttttgagaagtgtccgttcatatccttcacccactttttgatggggttgtttttttcttctaaatttaagttctttgtagattctgggtattagacctttgtcagaaggatagattgcaaaaaattatcgcccattctgtaggttgcctgttcactctgatgatagtttcttttgctgagcagaagctcttyagtttaattagatcccatttgtcaattttggcttttgttgcaattgcttttggtgctttagtcatgaagtctttgcccatgcctatgtcctgaatggtattgcctaggttttcttctagggtttttatggtttatggttttatggttttatgtttaagtctttattccatcttgagttaatttttgttaaggtgtaagaaaggggtccaatttctgttttctgcatgtggctagccagtcttcccagggccatttattagatagggaatcctctccccattgcttgtttttgtcaggtttgtcaaagattagatggttgtagatgtgtggtgttatttctgaggcctctgttctgttggtctgtatatctgttttggtaccagtagcatgctgttttggttactgtagcattgtatagtttgaagtcagacagcatgatgcctccagctttgttctttttgcttaggattgtcttggctatacaggctcttttttggttccacatgaaatttaaagtagtatttcctagttttgtgaagaaagttaatggtagcttgatggtaatagcattgaatctacgagtacttagggcaatatggccattttcacaatattgattcttcctatccatgagcatggattttttttctatttgtttgtgtcctctcttattaataagaggattttttatcagcagacatgattatatctgtgatttgtaaagtgaactggatagtgatcaagcccagtgggcaagctattaaaataattcaaaggaaaaatgagaatagcaacagtagtgatagagaagagattttaaaaaatgtattttttttctctctggagatgttaagtatttttgagaaaaggagtaataattgtaacttggcaagtgtgttttgcctttcctagttgaaactacttttcagcagtgagtggataggttgtggtacatgaattttattgttactcattattaaaaagtgtcttaaaaatatgtatgtcttaaaaatataagtaattttccttgttaattatgaaatatgtaatctctttttttttcctcttaatagccttatgttaatattggggttttattgtttttgcttttcagtactgtaagattgatgttaaaggcatggtgttcaccccacttcatcagcgtacataagttatctcttcttttggacccktattttatgccataatggtaagcttcagctcagtatgttcraatttgtgttttagaatgttctcttccttcatcttcataaagatatttgtatggtagatatagaaatactcttgtaagctgtacaggttatcccaactgggaaattacttagcaatcccattgcaaagtcttctctataaartatattgctcactaatcagtgttacagtgatcacattcatccatstatctgtgcttgtatttatgaagtattaaaaatatttacctatatctactttgccatattccaaatcgttggcaaggaggatgggtataaatacaaatagttttggggagtatagatttctcgtattttaaagcttttctttagattttattaaaatttaaaaacaaatgtaacctgctaactgcatataacgtatttcaggcagcatcagtgctaatcttctaatggcacatttctgttcactgacttacagtcactaaacatagttaggagtaggcatttaacttttgccattaagaaatgacagactaagggagaaaaacactttttaatgttttaaagaagcagcagcatttgacagagaataaatgaacattgaccaccatgttatttatttagataacccctattctgcgtcacaaacttcagaaaacatctgtcttccttctcctcttggttcttgcctatctactcctcccctattagagaaaagtagaagtatcacagtggggttctgacaacaccttgtattttgcatctatattacctaatcattttcctcttaagtttttgaaggagataatgaatgaatgatgcttttatttatgtatgtatgcatgtctcactagaccctttgaagttttaatttcagaagatgaaatatttacttgagatgactggctgtttaaaattgtcctagactatatatatttgattttgtttattataattttttgatacaaacaaattttatgggcaaaatttaaaagaaccttctgtatttgtgaagtgtatatgtacagaattatgttttcatggtggaacatgggatcagggaaaatgggagtcaggaatcttaacttgaatcctgggaaccagtttcattgggaatccgcttcttataagttttttttttttttttttttttttggtagtgacagaatctcactatattgtccaggctggtcttgaactcctgatttcccaccttggcctcccaaagctttggaattacaggcatgtgccacagtgcctggccaagattttttaacaaagcaaattagtgtagatttattataactgaacgttttgaaaagatggcagatttcagactttgttcacttatcatatttagatatttgataatgtgggttttttattgaacagtgcaagaaggcccactatttttggaattatacaaattctccatccttaggactaggtggtcacttaaaagttcccatgatttccaaagggtggcagtatttgtttttcccccttaccctcctgggactttggtgggtggtaggagtttttacccacatgcaatttggtaggttgaggtattggaatctgcaaaataagacagaagaatttaagtccttttaaataaaaactgaaagttctgtgcctcttaataaaatttaaaaatgactatcattatgaatgaaaaagactataaaacagaaaactagaaagaaaaccactggtggtatatttgggttttgttttattygyttgttgyttttgttttttttgagatggagttttgccctttttgcccagactgtagtacaatagcacgatctgggctcactgcaacctctgcctcccgggttcaagtgattctccttcctcagcctcctgagtagctgggactacaggcgcgtgctaccacgcccagctaattttgtatttttagtagagatagggtttcaccatgttggccaggctgatcttgaactccttacctcaggtgatcctcccgcctcagcctctcaaagtgctgggattacaggcatgagccaccatgcctggccatgtttaattttgtttagaacctagtacttttattcatatgtgtctttagaaatgatggctttacaaatgaagacatagcatagcttcaccatgttttttcctcgtctctaaaaaatgaacggatagggatctactagtagatctcaaaccttacatgtagtaacagtaatatatttcatcaattctgaggttcattttcttttatattttaatattactgaattgatgatgagttgatactcaagaatatcttagaattgatagcatatttttttctgtcttaatgttatgcagaataatgatgcatgctttcaatggcatcttraattcattgaaacatggcaatgatagccatcatttattctttctaggcactgagctagagatgttgtaggtttttttcattaatatattagcaatttctaagttaatgttaagtgccagtacaaccgcactctcaattttcaagatttttagcagatgaggagagtttagcctttsttcattttgattgtatactttatggccagtatatttttttgaatggtgctcttaaaaattaatgtctatgaagtgatgatagctgccatatccaaacctcccctatattagcctcacaaacactgaccagagagaccgtgtwagcattcttatttagtttgttgttagtaatcaggtgcccaagactcatattttttctttgttatatatatattgatcatagagtggagtggaggagacaaataaaggaaaatatattagacctgttttagaaaacattagaaatgttaaatgtatattaaatttttttgtggaaataactaatattaccaaatatactatttactttttacagcaacaagctttagaactagctttggatcgtgcagaggtgaggtgtgactaagttacatattgaaatagtgttgtctttaattgacaaaagctcagttttaagagatttttgtatgtgatttttaaaggagcacattactattttaggacaagtatgcatatcattttgctgtaaatatataaaaataccaggtgatatttggatcacctgttacttggaatcctcaagataataatgttacagaataaaacttacttgaagaaggatatagaatttctaaaattgtattttcctgttttgacaagttttctaattactcaaaggaaaaaatagctaaggtatacagtatacaatttttcatacagtaagcatattttgaacaaccataaaatatattgataatatttctgacctgtgaagtcatggttgtgaaactatgattttgcttatggcaatgaaatactctgctaaatcgtggtgcagttcaaatttcatttgtttgaaacttatctttagatgttaagtagtttttcctacaagatgtaattcagagagttaagtgaatagcctttttagccttacgtatgttttagatataytcaatacagttgttcatagtcaaaagcaaaaagcaagctgttctcataaacttttgttttttagtatgtcattgaaagtgcccgacagagacctcctaaaaggaaatacctatcaagtggaaggtatgaataattaattggtaacatcttagattcattgaaatatgatgatagctaccttttattgcattcctcgtagggactgagctagaaattttataggttctttgcatgtattaggaatttctaagttgatgttagctactatattcagctccaccccagtttttgggaaattgaggcaaaaatgtgaaaatttaggaaaaaattaaataacattcatgtcatgatgattactctgttaacattttatatatttgtttcattaaatttttttagaaaatctgtatttcaaaaactttatgacttgtatattgaagaatgtgaaaaagaacctgaagttaaggtaagtatacatttttattatgttgtagcttttgaaatgtagaagagaggaatttggaggagttacatttggagtattatttttgtgtgtgtgagtgaactaacatcttttttaacctgaccctagtcaattctgtagctgacycagagctctggctaatctggcaccaggcagagatcacctgctgaggtaggagtgaaggaacagttatattgagtatcagactgtctcactaggaagtcataagcaaagccacagtatatattatcttttgcttcttcttcccccgagaagtgatttatgartttatagcacttcctcctgagaagttatttacagatttatagcagtaacctgttttctcatgatgatttaaactggaaagccagagctattacagagcatgtatgaaattcaagtacagtaataaaaagtgagcttggtcataaaccgagttcatggccaatttaacttaattcatttttatttggcataaagatatgggtagtagacatgtaacagaagtcgatttattgatgtcttggagccctcgggttggaagggtctaaacgtctctatgagcttttgttgtctgtctttaaaaatgaatacagttttactatttaggccaaaaacagtggaattccagtagtgtctaactttaaaatctttacattaggaaaaaaattatttttaaacttataagtaaatcttacagtatgtttttcataagttctactgatacatacttgacatacaataaattgtacatgtttatagattttttaagttttgacatgtgcattatagaaacacctcatgaaaccatcactacaagcaatagaatgtayatattcatcatgtcagtgacagaactaaaataagagagctacatatatgaagattctaaattggaattggcaagccactctccaccagctaaatgtggcctactgcatgtttttataaatgaatttttattggaacccatcacacctgttggtttgtatgttgtctaggcctgcctcacaggtacaaagacacattgagtattgcagcacaaactatttggcccacaagcgtaaaatactatctggcccattaagaaagaaaatttgcaacctctagtctaaatgggatcaactctgtggtagctaatttgttttgttgaagaggtacacatactgtaaaaatttatctaattctgtcttaagtcaaattatgagggttttctctacactgaaaagactaacattttaagtctctctttactartttaacatcaaagtggttaaaagttgtttgcctttttaaaaaatgttcagattgcttagtgttttgattctatggtgatgacagattaagaatttatcacttctttctgtatgtgtgtatgatatatgtttaatatatatttactaaatataagatattcaaaacactttgwtttttgagattctaaaaaaatttactgttatttttgctaaataagatttgatgacatgatttgttaaatctgtaagtaggtaggttttattttaaattataagcatttttaaaatcatggactttgttgtggtttttaaggagctgttgaattggatttatagaaaatgtccaaattgcttacttcgtcttaccaattagatatttttaggttcaacatttcagcttagagctgttgaacttgtttgtatcttatttagcctataaaatatttaagaaatgtgcacttcttagatacaaccaaagagaatgccccaaattctttaggttagacttctacttagtggaaactgtatgcttctgtgttttatatatttgcatttaatggttttatatactacttatttaaatatttttatttcttaagtattcaaaagtacttgttttatatttaagtgcttttattgtgttataggtcacccatttttaaaatatgaattaatttgcataaaacatagtagtaaataaaaattaagtttacatagctgtcccatacgtagtggctatagttttgtgagccttctccatttattcagaatcataatgcagaaagagcaccaaaaggttaattcaagcctgattttgttaaatcatagcattatttgttaaggttatactggattattttcatgagctctgcctctttttaaagcagaaattaagaagaaatgtgaacttgttagagaagcttgttatgcaagagactttgtcatgtttagtggtcaatctatacccaggaaatgagggatattctctgatgctcaggggaaaaaacggatcaggtaagaccctctagagcacagctgccrcaaaatacttttgctaggcaggatgtgckgtttttttaaagtagttttttaacctgctaaagcatttgtccttcagatagtgatgacctagtgataaaaacagattttgatcccagttttcttccttatgatatgttttggtagaatattagaaattatctctcttacaattatctttcctgaatgtgcattttagaagtattctaattgatatgtctttcaagtccaattataaaagcatctcagaaccaaaggaaaggttaaaaaaaaaaggaaaattatagaggcataacttacagatgattaaaatagaatttcctttcattctattgctatttatattttaagatagcataccgtgtttaaaggtaggtagtcctgcagtttgaacatgagtctgaaatcttcaaaattaagcagactcactgccttttgagtaattttcacatattaaaatatttctattaatactgaatatgaacatttctgttaatggtgaatatgaaaataatttaaaaatagaaacacttcagtttcattaaagaggtgtaaaaatttaatatgatgataatgtgaattctacaaggaactcacatagctggaattttgtgtgtgtgttggtaattaattgtaaagtgtaacaccaagagaattttgttctaaaagtgaccacttttcagataaggcaccaaattgtccctctgatttccagattagattaattggtcttcagtgaactttcagttactttgacattggaattttatcatattctgattattttgctttgggctgtggttcagattgtgacgttatgccagatgttttttcataatgtgttaggtttyttttttcccccttaagaaggacattaggagggccttttggttttgttttttatttttattttttttgatccttgcttggttgaaatgccttttggttttattatatatagttctttgaaaagccatttgaattatacagctaagctttcagtgagcatgatcattttcaaacttcatgttttaaattaagattccgagaccattcgactgccctatgaagaaggagagttgcttgaatatttggatgcagaagaattacctcctattttggttgatctcctagaaaaatctcaggtacaaaatttttgtctttaaaatgtctttatatttgttatatgtatatgatatatatatgtcacatttttatgtatgtatacatatatgtatataaacgactacatgatgtttcatgacagatgatatttaatttctatcactgttcccaacagcctttagaacatgaaatcaggctgggctttggtggctcatgatgcctgtaatcccagcactttgggaggctaaggcaggaggatcacttgagcccaggagtttgagctcactacagtctcaaacccctgggctcaagtgatcctcctgtaccactgcaggattagagaaggaaggattagagaaggaagaggaaaaccagaaytgcagtgattgcaccactgcactccagcgtgggtgatagagcaagaccctgtctctaaaactaataataatagaagatgaaatgagacatatatagctatctggaaatgggcttattgtcggatatttaacctttagggtatactgaaacgtagagacgtagttcttctaaaatagttagaacaattagctcatcaattggaaatctccctrtagttacaatcaagaaattatgaaagaaactactttgaatatttatgaagtttttcacttgggggccagaaactggcctttacatctgtacttctgttcatagcttgcctaggtaagcactcccttgccctgttctactttcttcttactgccttaacttaaccccagccatactgtgtactctactgaggaaaaagaagacatcacatgagaactctcgtttcctcctagcaccagtcgactagcatccctacctctctcttcatatctgcctgccttcccgttaaaatagttgatgtatactgtttatagacatccatcccctccacttgttttctggatcctycccttccttctcaaggacttaaaattataacctctctttttttctatttctctttctctattaaatgcagaatgcaagcatactgtgttacaggttgagcatctcaaatctgaaaatttgaaatccacagtgttccaaaatctgagcactgactgacacttaaaagaaatgctaattggaacatttccgatttcaggttttttgattagggctgcttaacctaagtataatgcaaatatttccaactctgaaatgcttctggtctgaagcacttcagataaaggattcttaacctgtatgtctcaaattttaaaaaaatcctcccttgacctcatatccttctccaactactgctcttgttactcttgacagccaygctactcaaagaatttatagtcatttcctcttttgcagatcccattctttccaccacctatctcatttggcatcatgacatcgttctgcagaggctgcatttgtcagttaccagtgatcttcatatactgaataattggtcacttttctgttctcttcttaattggcctcttagcaaagatcagtggatataactgcgtcctgcttgaaatgcctttctgttgacttctgagacatcattttcctggttttcctctgctttctctaatccttcggtcttttttactataatccctgttccatccataaacatgtgtgttttcaggttcagtccttggctctctgtttttctttagtaatattctccctgaatgatttcagccagtttcatgggtttttaaaatgttacttagtctattgcttatatgcctcaccatggccattccaccaagctcctaacttacatattttcttggatatataataggttcctcaaatttaacatgacaaaaacagagctttattttacctcccaaaccagttttatcaccagtctcttcagtctaacagatgactctgtccttaccttccacattcagtccatcagcaaatgccagtctctctttaagatacatgatcgtgcccagtgctctgaacaaaacctttgctttcctgtttgtcttcatcttctagatctcatcctcactcgctgcattccatccatccttgtctcatttccacaataaaacactccaagcttgttcctacagtaagaacttctcatatgttattccctctgtctggaatgatctgtccctgaagtgtctggccgtttcttgtgattcagatcttaggtaaaacctaaggtttctatctgcacatacaatccagattagcccttccctatttgatttcctttatagaattcatcactatctaaaattactttgttctgtttacatgtttattgcctgtcttcccacaactgagagcaaatgttgtctgactactgtatctgtgaagctgtacctggatagtgcctagcacatagtaggcattgtagttgctcagtaaatatttatttaaaagaatgacaataagaatgacaaaacatggagaccacagtacccactaaaagttctgaatgggtgaaaaacatactatgagtgaccatggcaagtcataactagcaagacttcgatgataatagttcttacatttgagcatagaaaggactgaaaaactatttttctttttttttttttttgaggtggagtctcgttctgtcacccaggctggaatgcagtggcccaatctcggctcactgcaagccccaccgcctgggttcatgccattctcctgcctcagcctcctgagtagctgggactacaggcgctcgccaccacacccagctaatttttttgtatttttagtagagacgcagtttcaccatgttagccaggatggtctcgatctcctgaccttgtgatccacccgcctcggcctcccaaagctgggattacaggcatgagctactgcacccagcctgaaaaactatttttcatttgaattttatatttagcttccctcttattaataaaggctaagggcaaaattatatttctgaaaattttagcagagcaaatatagaagttatatctagaagctaaaacactggcaaggttggttggcaatttataacaatgataaactttatagtaatgacaaagttagtgaaatgtaacagtaagcctgtgagctgcagaagaacagcagttccaaggatctgtaacataatagtatgtaaatgccaaaagtcaaactgttgacttggtagatgccaaagtcaatctataattagaaactattaaatagttttaaattgcttcttgtgtcatagtgatgaacatgaaatacttcctctgaaaaggtttacatagtgttaaatctaccaaggaaatctactgaagagtacatacatgagtggccagaaatgttgcatgaatgtaaagaatgcgaaatgtttgatataaacccacttatttaggcttttggaaaaaaaaatgacgtttacgtatttttgcccaaacaggttaatatttttcattgcggatgtgtcatagcagaaatacgtgactacaggcagtccagtaacrtgaaatctcctggttaccaaagtcggcacattctcttacgtccaacaatgcaggtaaggatgtttaattaagaaatactattttagattttagttgggagttttatttatcgaattcttcatatgtttgtgcatagattaataagttttttaaatttttatttcttctagactttaatttgtgatgtacattcaataacaagtgataaccacaaatggacccaggttagttgttttgttttttaatctcaaacaggcaaaatataggatgaaaaaaaattatcattaagcaaaagtgattttctgcttatttttattcaataattaagtttgatgctttatgtgaaaagctggtattcctttataagatctagaagttaagggtctctttatatgtgtagtaatccctcaagttgcctaagatcattttaaggtcaagctggcctaatatattcaatgagataaaacttagttctttatctcctctcaaacagaagaaaaatgttttgtttttaccatggttacaaatagatactggtttttttttttcaaataattcaagtttctaaaccctagcctagcctatctttctttgccatttatactggttgccttgaaatgaggggaactctcttacccctgagaataaccagttaacccctccagttctggctcagtgttatatgaggggacttcagaaagtttgtggaaaactggaattaaaagataataataaaaaatataaacttttcttctcaatataagctccatcaagttcaagatgcttgtaaatgatatcaaccatttatttagtccacccctgaagaactgagggtcctgggaactgaaccatatcaatgcaatcttttctacattattaactgaagaaaaatgggtactttttaaactttttttttttaagattaggaaacaaaaagaagtcagaaggagccaaatctggactgtaaggtgcatacctaatggtttcccatcaaaactcttacaaaatttctcttttttgatgagaggaatgagtagaggcattgtggtgcagaagtctctagtgaagctttcccaggcatttttctgccgaagctttggctaactttctcaaaacactcataataagcacgttatcattctttgttccttcagaaagtcaacaagcaaaatgtcttgagcatcccagaaaactgtttccatgatctttgctcttcatctgtctgcttttgctttgactgaatcacttctgcctcttggtggccattgccttaattgtgctttactatcttcaggattatactggaaagaatgctttagtatcttggtcctacttgttgaaaatttctattgaaagctctgcttttgcagctgatcgggatgcagtggttttggtacccatcgagtggaaagtttactcaactttaatttttcagtcaaaattrttcaggctgaaccagttgagaggcctatagtgttggcaattgtttctgctgttaatcattggtcctcttcagttaggttacaaacaaaatgaatttttttcctcgtaaattgatgtggaagatctgctgctgcaggcttcgtcttcaacatagtcttgtcccttcttaaaacaagttacccatttgtaaactgctgctttctttgaggcattcttctcataaacttttcaaaaagcatcagtgatttcacaattcttccactcaagcttcaccatcaatttgatgtttgttcttgcttcagttttagcagaattcctgttgctctggtaaaggctgttttcaaactgatgtcttatccttcttagtgtttcaaactaggttctgttcagacatgttataacagcttagtacatgtttattttggtgcaaaaagttttgaaacctatgtatagttttttcttaatactcatttttcataaactttttaaagaccccttgtatatgagatgtccactcacaaaagtgttcagttgcctgactatagtgaggaataattactaagtcaaaagaaaatatcagtaatggtagttatcctttctgtgacatgtgattataaactaagcttcagttcatcagtaactaccaagtattgtgttttggtttgggctataatgttgtcatctacaaaaagattaaaagctattaaaagaatattrgaaaacagaaaaactcattggttaccatcagagtttgctagggcatcagattcttactctgaagattgataaaggagagaatataatatttatcctgcccttcttgttatgaactgtattttaggcagccaagtaactgagggaaaattcttaggaaaatttccagctaataggtgcaaaagaaatgatagacttttaaaaaataaaagtttgaaagtcttaatgaagtagtgaatctagacagcagtatttcttggatgtgaaaaccattagatgataggttaatgggaaattttataatgtagaaatctgatcaaacccactgattgaagatgagacagtcaattattgtgtacctcctggtttgatgcaagagacagtacacaacagtagtaatagyaccaataaagaactcttgtccaaaaaaaaaaaaaagagcccatattaaatcaagccactagttgtaactagcagtttataggaattcmgtgaataaaataaactcttaagtgacacaatgaggaagaaaccagccagatctagttaatggacatgagaaagcaactggttaattctaacaaattcttatttagcaatattattaattgattcacttttttaaaaaaaatagccttagctatcaagatatttcagaggttaagcaaaataataggattcagtaaaatatgttatgtgataatagtaaagagcctgtatgtttggaattgggtatatagagttcacacaatattagcagagtcatttttattcttgtaatgtagttgagttgagtataggataggactgttacttcacagttactgaaaaatgccataaccctttatgaccctataggttttgtgagagcagagggttttgttttgctcactaccttatccccagttcctggaaaggtgcctaacacatcataggtgctcagatagtttcttgaattaatgagtagccactcttacaacctgaccattccgtgctctacaaattatagtcatacctcggagttactgtgggtttgattccagagcactgccgtaaagcaaatactgcaataaagcaagtcacatgaactttttggtttcctagtctataaaaaggttacatttacactatatagttgaccttgaacaacacagaggttaggggcagtggcccttgtgcagtcaaaaacccatgtataacttctgactcctctaatacttaactactaatamctactgttggctgggaagccttactggattttttttttttttttttttgaggcagagtcaggttgcaactcaggttgcagtgcattggcacaatctcagctcactgcaatctctgcctcctaggctcaagtgatcctcccacctcggcctcctgagtagctgggactataggtgcatgccaccatgcccagctaatttttttttatttttggtagagacaggatttcactgtgttgcccaggctgatctcgaactcctgagctcaagcgttctgcccgcctcggactcccaaagtactgggattacagatgtgagccaccatgcctggcgattaacatgtattttgtatgttatgtgtattgtgctctgtattcttagaattaactgttagaaagaaaagaaaacattattaagaaaatcctaagagaaaatatgtttactattcagtaagtatatcatattaaaggtcttcatcctcatcatcttcacattgagtaggccaaggaggaggaagaggaaaagttcatcttgctgtctcaggggtgcaaagagataaagaagatggaaggggaggcagaagaggcatgcacactcagtgtaacttgtattgaaaaaaatctcctagctggtcgcagtggctcacacctgtaattccagcactttgggaggctgaggcgggtggatcatgagggcaggagatcgagaccatcccggccaacatggtgaaaccccgtctctaaaaatacagaaattagctggacatggtggcgtgcgcttgtagtcccagctactcaggaagctgaggcaggagaactgtttgaacctaggaggtggaggttgcggtgagctgagatcgcaccactgcactccaacctggcgacagagcaagactccgtctcaaagaaaaaaaaaaaactccagtttaagtggacctgcatagttcaaatccatgttgttcaggagtcaactgtactgtagtctattaagggtgccatagcattatgtttaaaaaaaaatctatatacattaattcaaaaatactttattgctaaaaaatgctaatgatcatctgaacctttagggagtcataatctttttgcttctggaaggtattgcctggatattaatgactgctgacagatcaggatctgacagattgagatggcagtggcagttttttgaaagacaacagtgaagtttgccccattgattgtttctttcatgaaagagttctctatagcatgtgatacagttttaccctacagtagaacttctttcagaattggagttagtcctctaaaaccctgttgctgctgcattatcaactaagtttatgtagtagtataaatattacgttgtcatttcaacaatgttcacagccaagaatagagtctatctcaagaaaccacttttgccaggtgccatggcttgtgcctgtaatcccagcacttttgggaggccgaagcaggcggatcacaaggtcagcagttcgagaccagcctggccaatacggtgaaaccctgtctctactaaaaatacaaaaattagctgggcatggtggcagttgcctgtaatcccagctactcgggaggcttaggccgagtagcaattcaagaattgcttgaacccaggaggtgaaggttgcagtgagcctrgatcacgccattgcactctagcctgggcgacagagggagactctgactcaaaaaaaaaaaaaacactgtatatggtcatccataagaagcaactcatccattcaagtttgatcatgagattatagtggttcagtcacatcttcaggctctctacttctaattgtagttctcttgctatcaccacatctgcagtgatttcttgtcctgaagtcttgaaccccttggagtcatccatgaaggttggaatcaacttctcccaaactcatattaatgtttctattttgacctcctcccatgaatcatgcatgttcttagtgtcatctacaatggcacatcctttccagaaagtttttaatttactttgcccagatccatcagaggaatcactatctatggcagctaaagccttacaaaatacattttttaaatattaagacttgaaagtcaaaattagtccttgatccataggctgcagagtggatattgtgttggcagctatgaaaacattaatccccttgtacatctccatcagagctcttgggtgacaaggccattgttaatgagcagtaatatttttgaaagaatcttttttttctgagcagtaggtctctacagtggccttaaaatattcagtaaaacatgcagtaaacagatgtgctgtcatccaggctttgttgtttcatttatagagcactgatagagtagtaattcttaaggattgtaggattttcagaatggtcaaataagcattggcttcagcatcaagtcatcagctgcattaacccccaacaagagagtcagcctgttctttgaagctttgaagccagacattgacttctctctagctatgaaagttctggatggcatattcttctaatataaggctgtcttgtttaatttgaaaatctgttgtttaaggtaaccaccttcatcagttatcttagatcttctgcataacttgttgcagtttgtatatcagtacttggctgcctcaccttgcacttttgtgttatggagacagcttctactcttaaccctcatgaaccagttttctgcttyaaacttttcttctgcagcttcctcacgtctctcacatcatagaattgaaaagagttggaatttgctctggattaggctttggcttaaggaaatgttgcaactagtttgatcttctatccagaccattaaaacttcctctgtatcagcaataaggctgttttgcatttttrtctgttatggatattcactggagtagcacttttaatttcctttatgaacttttcctttacattcaccacttagctaactgtctggtaccataggcctagcttttggcctgttgtagctgtttataggcctttctcactaagcttaatcatttctagctttggatttaaaatgagagatgtgtgactcttcctttcagttgaacactaagaggccattttttgcctaatttaaatattataatgtttctagaagtaagaagtcctgagaagaaggagaaagataggggagatcccacactggggagtggtggatcggtgaagctgtcagagaacatacatcatttcttgatttagtacacattgaatatcacagatcaccataatagatttaataataatgaaaaagtttgagatacaaaaaaaattaccaaaatgtgacacagacacaaaataagtgtgtgctgttgggaaaatgatgctgatagccttgcttagtgcaaaattgccacagatcttcaatatgtaaaaagygcaatatttgcgaaccacaataaaatgaggtatacctgcattgaatttccattagaagtttctttatgctgtctggtttctaaaagtttacatgcacactaacattggaacttgaaataccatattttactgtagtccttagcagaattccagggaatatttctagattaagtgcartatatgattacatatttgaaaatcttaaatctggtattgacatatgctcttacacatttcaggaagacaaacttttgcttgagagccagctcatcctagctacagctgaaccactctgtcttgatccttctatagcagtcacctgcactgcaaacagactgctctataacaagcaaaagatgaacactcgcccaatgaaacggtaattgcctttgtggaagggtgaaccaaaagacacaagtagctataaattttgctatttatagtatcttttccctccagggtatggttgctccgattttggtggggaagggtagagatgaggtctctctttgttgcccaggctagtctcaaactcttggcctcaagtgatcctcccactttggcttcccaaacagctgggaatataagcatgaccaactgcaccagcctctgatttttttttttctttttgaaaataggattcttaatggtctcatattatatatttttatatagtattattatttttttaaatgctctatgctttagattgaactgttgcattttctgcagtcttttaaagaataaactttttctaagtttatagtctgtttgccaaaaaggtaaagaggctgagatcaaatatgaacagaaagaataattttttcattattttcctactaatgaatgactgatttaattgttgttaatcctactttaaggaaagaatttgtaattttgagatttgagaaaatatgatcatagtttttagaagtcagttataaactgaatccaggcacacctaccttttgtttttgaaacaaaccaagcttattcctccctcggcatcttttaaaaatgtcccttcaaatagtcattccctgatctttcagaatattttcttttccccaccctccatgggaaacatgaggggatttttccccggtagtcactgtgagaacctctttgagctcctggagataaaacccccaaaagtctgggggctcccagtgactaggtccccttggagttttgaatctctcagacatgtccacagtaggcctccagcaattcatcagttatacttgaggttccctaccctggcactggttcctgaggaggtttctgctaatgggtttctgcttcagcaaggcatgatggtctgcatttgcctattggtttctccaagtttggggcagtggtttgtcttgtgaccacatctctttgatggatctaagaagaatcgttgatttttctgtttattcagctttttacctgttaggatgaggtggcaacttccggagtcttacatgcctgtacccaaaactggaagttatccccttcactcccatctttccatagctaattccttctcatcattcctatctcagctcacatgtcattttttcagactcttttcctcccctccctctccccattccttccctaatgttgccctccttatcccatactctccacagtactcttttgcttctcttactgcttcttggtgtctgaaatctgaaattattttatctgtttacttgtgaatgtctcctccccctctggacttgatagctctgtggtgatgggaattttgtttgtcctattcatttttatttcacctagtcctagttcctaggactgtgcttggcatgtggcagtgttctataaacacgatttgtacatattcagcactgactagtttcaactcacatatattatgagtttcttttattagtgccgtttagttcaaatttcttaatatttcaggtgtttcaagaggtattccagatcctctctgaatcggcagcaagatctatctcattgtccacctcctcctcagctgaggttacttgatttcttacaaaaaagaaaggaaagaaaagcaggtcagcattatgacctcaaaatttctaaggcaggaaatgtaagtatatatattttaaatgaagcttattatgcccaaaagcctgtcttatttagcattttcagtatatttatattgtttttaatttttcagtatattgtttttaatttttcagtgtgtagatatgtggaaacggagtccctgtaatttggccataccttctgaagtagatgtaagtcagttcatgaattactttttttcatataaagtttctcagttttactattcggttgcttataccttgagaaaacaaaaaaaaaacttactttaaaaacaaagtgatttagatcatactctaaacaagttttttaaaaacaatatgatttatttcaaaaaacatcgaaaaatgatttttagaagctgtgtattgttcttttttcacattaagttgaaagaacataaccccttaatatagttttttggagcaggaatagtaaaacaattttaaaattggaaaaatacagtgtatattacataatcacgtgaaatctctctttttttgataatatttcatcaaaatttcctaatagtgcttgtttactcaaactggttaaatttgaagattaataatattatttgacataaaataaaataaagattaataatactagagaagtaaccaagattaggaacattgggttgtattctttattgatccataatatacatgaactataaatggttgaagacaaaaaagggatattttgatgagtgatcctatgtttttctttctcctctgttgttttttatattcactcaactctttattttcagatttgttcttctgttgcaccctttccatgctagcacatgcattattcttactatttctgatttaaaaaaaagaaattacgcaaagcacaaagccagaagcagcagtagactgtatatacagctcaaggaagtaagccatattatcttttggtagcttatgtgcagttcttcaaggaacatggcctgataatagaatttcagtgtaaatactgaagggtggaatttagctttggaggacaagctggagtacttcccaaactttaatgtccttacgaatcagctggagagcttgttaaattgtaggttgctactcagcaagtctgaggtgctaagatgcatttctcacaagctcctaggttatgtgatgctggggtccatggaccacacattgagtagcagttgccctcaaagcttctcagtctagctcaatcagaagaatcacctaggatatcagttaaacatagagatttcaagccctactcaaaatctacttacttaggatttctaagggacagacatgaaaatctgtatttttaataggtgctccaggtaagtctaaattactcttaagatcgtggttgcctgtaagataataacatttgactcacacagatgcctaggacatgtacagaatatatggtcaagtctgactagaaagtggaaaacgttcaaaaaatttgatcagctttaatattttaccttccctagtctccctcagttttgtccccactgttacatgaccgcttttatttcaagaaaagcctgccaaaaggaaaagatctttatccttatctctctgacattccaattttcctgaaggaaaagctctaaaggaaaaacatatcagcttatggacaaaaaaatgaagaggcactgtctagaaaagcagctgtgtttattaacacttatttatttggtttggttttattaaagttgttttatacacatcagaagacttttaaactgcttaagcataagtagttgataccggtaatttaagaattcttgcgctaacaagtatattgtattgtcgagttacttagtttcttctctttgatcagaatactgattccattttatctgatatggattctattttatgtgrtatttcttgatttgattgtttaggtggagaaatatgctaaagtggaaaagtctatcaaatctgatgactcacagccaacagtctggccagcccatgtaagaaatcattgcctgtctctgtttctaattatgccatttctaatctggcctctgaatttattaaacataaagtgcaattgccattagtttgggaccttttttcttttttaaattagtttctgcgagttcagtttattacaagaagaaacaactattttgtttatcagagtatgctttgcattttaaacagcaattttttatttttattttttatttttattttattttaattttttgagatggagtttggctcttatcgcccaggctggaggtgggatcttggctcactgcaacctcttccacttcccaggtccaagcaattctcctgcctcagcctcctgagtagctaggattacaggcacctgccaccacacctggctaatttttgtatttttagtagagacagggtttcgccatgttggccaggctggtctcgaactcccgatctcaggtgatccgcccaccttggcctcccaaagtactgggattacaggcatgagccactgcgcccagccttaaagagcaattttaatgaagaacttcatttttacttttggtttgcgtattggtagttctgatttgttttgtttctaattaataaattcttctaaggctggcttttaacagaagtgttctttataagttttcctaattgcaataataacgtcttaaaaagagaggaataggtgtaatatttaaattaggtgaactctgggagtgaaatgatgacagatgttttttgtgtgtgatagcaaaagcagacaaatgataaatagatctgcttttgaaagttttatccttttaatattatttaatatttgcaattcatatatctagtatgaaattctgccatattaagcttgattaaacatgccatttaaactctcattcccagagtaycatgtaaaaaagaatcctgtactgccctcctgagcataaacaggcacggcagcatgaggatcaggggtgcaagcttagggacagactgctaactccctgtgtgaccctaggcaattcatttaacctctctttgcttaattccctgacttctaatacggaggtaataacagtgccaaccatgaaaatatggtggagctttcagtccctgtagagtgctgagaacagtgtttgattaatgttcattgttattatatgtatatcaatatgtctaataatgtatttaatgatgtattaatattgttacatatgtgttcatacttcatagtatatgttaatgctttactaaatgcatgctgagtgcccatatagtttttaggaaaagaaccgtgctgtgctttattctcataggcagacttaaatatctttgtagcctaagtgctgtgtgtcttcctatcgtcagatacatgttactgtatcatttattcctgatttttactaattcttattgcctgcctacttgtgaaggtatttatttgaggtgctatgcatttttcaggatgtaaaagatgattatgtatttgaatgtgaagctggtactcagtatcagaaaacaaagctgaccatcttgcagtcgcttggagatccactttactatggtaaaatacagccatgtaaagcagatgaagaaagtgacagccagatgtctccatcacagtgagttctgttaaatacaagtaactggaaaaaaaaaaataaggcaccaagaatttatctagtaactactgatgaaccattaatgaataaaaatttctctttgggaactcacttattagttaaatataacaattagatttggcggtagacctaagtaaacttaagtcgtagttaccatgttgctcaagagttattaaaaataaaaaaacctatggtataattatttttatgcttgttttgaaggctattcctgtgatatccttctttatatgtttatggcacttaggactttaacctgtgaacatgaagtgtttgggcaatagtgtgtttaaataggaagcaagtttactataaatgtgaaaagatgcttggtattttggcactgcatgtaaggacacagactcaatgcttattgtagttattggccctacatattaatacataaaaatatagatgatcttccaaaatgtatgaactacatatatttggtactgtcagtatttagttttattttgttttactatttatttggtttttttaatcaaattgatttgaaaaataagttttctgttttgaaaacaaaaaagaagctcagcagaaaaggatgggggcgaggtctatgttaattgtaaagcctttacttacacaaaatactaattgaaactacagtagaaaggtggattttaaagagcaaccccaccaatatttaggtaaaagtcaatgaaaggaaataacagggaatcctcagcttgttttttcacatgaccagtttttattattgtaaaaggatcagatattttgataacatacattttcttcttttttttttaagttatagacatcacaacagtttatttctgaatcctcagcatgcatttctaaggaagccattttttttctttatttttattttagatataggggtatgtgtgcaggtttgttacaggggtatatttatgatgctaaggtgtgggtgtctgctgatcccatcacccaggtagtgaatatagtacccaatattgattacttatatttaaaaaaatcttttcacttaaagacaacatacattggccatttttaatttattaacttatttttgtaraacacaagggtgatacatgttcttttgtgaaaaaattggtctatagagccaaatgactaatttgtttgacaggaagagaattgaattttttacctttgcatcagagtagctgcatgatttattatcttccagtcattcttccatattcataaaatactttatttaataaactatgaagttaaagtttgagctgcattaactaagcttttttttacattttatatttcagctcgtccacagatgatcattcaaattggtaattaaaaaataaactattttaatctgttaagaaattacataaatatcaaactctttaaaaagacttgctaaatatactttatttgaatcagtgataaatatgtatactttgtttgaaatatattctaaggatctgttatgtagacattaatagtaacttctaaaattgcaggttaaagtgagaggaaggccaaagacctttgcacatgttagttcagtgattttgctttaggatcaatagttgtaagggtatatagcacttggtaactttcagcccagattatgttttaataaataaattttgtgccaaaagaaatatcacttaattaaatcaaccaaattattcacattgtttcataatgcatgcaaaacttagtcattgtttcatatgtttaaatgcattaaaaaaatttttttcatatcttggtagatttaataccagtttatattactgtgactaaaacatggaagattcaaaagtaatcccaagccttcttaagacaactcttacctaatacttttctctccttttttttccttaaacattttaggttcattattggatcaaagaccgatgctgagaggtaaaaatatttgcatctcttattttggtcaggatggatatgaaaaatttttcacccttataggatagagaatactaggagttaaaaactttgattttggttatgctgttaaccatatttacactgtttaatatttatgggyctctgttgtaaaattagggcattggacaataaaacctctaaggtcctttccaactttaaaatcttactgattctagaaaaatatctgtaagcttgtgatacaccaaactactaagaatggttcttttcatgggatgagatttttgggggacttaaatgcatttttccaaagtttataatacctaggttttttttcatagaattaagaaaacaaaagaaatgtttaaaatatagttttgttttaaataagaaaacttagacatatctactgtagctaaggaagatgatttctagatagtactttaatcagaatctaagaaaggaattgagtattttctttggctgcttattacttaagtaatccctgtaatttctgtattagaaataagatattgaaagtatatctttagattgttatttagcacaatgttttggacaatttgtcattgaacagtttaaaaatatgtacttttaayacaaagataaattgcctaatttttaatatttatgttaattttgatagaactttctttttgccattaatagtcattattctttcctataaaataaatttgtgtttaaaacaggttttctaatctttacctgttttctcctgatattttagggtagtcaatcagtaccaagaattagtccagaatgaagccaaatgtccggtcaagatgtcacacagctccagtggctcagccagtctgagtcaggtttctccagggaaagaaacagatgtgtgtttcattaatgttacttctttgtgcccagttgtttcacaagtaatctgagaaatgttaagaatcatttttggaggctaggcacagtggctcatgcctgtaatcccaacactttgggaggccaaggtgggtggatcacctgaggtcgggagttcgagaccagcctgaccaatagtgtgaaaccccatctctactaaaaacacaaaaattagctgggcatggtggcacacacctgtaatcccagccactcgggaggctgagacaggagaatctcttgaaccccggaggtggaggtttcagtgagccgagatagcgccactgcactccagcctgggcaacagagcaagactccatctcaaaaaaaaaaaagaatcattttttgaggagcgggggtacagtttagttttgtttctacttttacctttttttaaaattatttaactctttataacatgatttttaaatgtacacaaagataaaaggaaaattacaatgaacacctgtgttctagtcatttggcttcaacagctgttattttcctttaatagataagtatggaagagtggaagcttgctttcatcttactcctctgcctttctccctaaaactctctcttcccaccctattactcagaaatcttttcctcattctttatgtgtactgtaatatatttcatgaatctcatgtgaaattttctctgtaatacatatagtattcaatctgtaaccactaagagcactttgcagagttaaaaatctgggatttatagcagtattaattttatttaataaactatgaagttaaatataaatatcatctggggtttatagcagtattaattttaacaagtaagcttaatgtcattgtcttttagcaaactgaaaccgtgtcagttcagtcttcggtattggggaagggtgtaaaacatcgacccccaccaatcaaacttccctcaagctcaggaaatagttcctcaggtattacatttcttagttttttgcagtctagaataacaaatattatataatcataatctctttttaaaactttgccccattttgatttctacagttcacagaagtttgaattataaatttaggaaataacttttatgttcttctaggtaactattttacaccacaacagacaagcagctttctcaaatctccaactcctcctccttcttctaagccatcaagtattcctcggaaatcatctgtggatctcaatcaagttagcatgctttctccagctgccctatcacctgccagctcatcacaaagtgagtcataacttaaattcttcattaaatcttcataagcttttgcattagtgtttctyaagacagcttttttcaacctgtgaagtagtgatatctgaatgtactgtgtacccaaaatgtataagttgctagaagcttcaggcagagctcttgttgattgtatgtattatgtctctattgtaattgtacttgtttttctgtatctgtgtatrcattctgcgtgtacctttcttataggcttacaacctacacatctccttaaaaaaataacctggtagttacatgtggcaataagatttcaaaatattttttattccagtgtaccctaggatcattttgcatatttatgtaaattgtgtggctgatatgaaaaaaatgtcataagagttgttgctgcaggtcctatctttgtgtatatgtaagaagtcaactagttccaaggtggtgatacaataaactgaaaaacaatatttcaaaaacactcctacactcttttataaattgttgtcagttactaaaatgtgatgataatcataaagcattattctgaagatactgaaatgtaatttttactactgaatacttttttttaacatcaagaagagttatacaagaatgctagcattagtttgggagaatttcttcaaattagtaaatatctgaaagtaccaatttggggaaaaaagtcattccagttttttagattttttatagatagctaatatatgctgaaagttttagtacactgcacagtgatagggtggtcttcgcattagatataaacatcttcatctcgatagctcaaaaggtgtaatttttctgccttcttgttttgcacaaagaaaaatatataaattttctgaaagtcttattcacacttcttatgttgtgggtatggattatggtaatctactgcacacagttgttactttaagtaagggttgagtgacagcttctggacattcacatttctttcctttctttctgcaggacatgaaagctaaaaaagaaaacacctcaagagcttttggttttacttttttggtttttgttttttgkttttgttttttaaaaaattgataaactgtgcatacttcattcacaacagattttctatacattctacatttaaacagaagtacacagttactgttaaagatgcagtattatctctcagatatttgctttattactgttttttgtaaatttgtttgtcaggataaacttgatgtgttaggaattaaacatgtatatttaggtgccaaatatgattgttaaccatatgtaacttattaaatatgtttacagtttatctcagacttttacactaaataagcaatatttttaaatgaagtcttgaattagtgaaatcgtaaataacaaattaatttgaattcgttttgaactttttaggccaaaggcagcatgtaggaaactaacttttaaatgggtattgtggtagaatataactgtatatttttactgttactgcaatagcatctttaatgggatttttaggtgatatactgcatccttaattgtaattgagtgtagcaacactcatgtatcatgtgtagaaattaacacttgcagttaactgctaaaaaaaaaaaaactagaacaaattgtcagtgctaagtaagattccattaaccttattttaaaaggactggccatttataacaaactagcaatttttatttttctcaatgagcaggatctggaactcctaagccatctactcctacaccaaccccttcatcgaccccacaccctcctgatgctcagagctcaactcctagtaccccttcagccacccctactccccaagattcaggcttcacccctcagcccactttgttaactcagtttgctcagcagcaaaggtctctgagccaggcaatgcctgtaacaaccattcctctttccaccatggtaacatctataactccaggaaccacggccacccaggtcatggcaaactctgctggacttaacttcatcaatgtagtgggctctgtttggtaagtttgcattgatgttcggattttttttttataaagatagtttcaccaatctaaataaattcttaatgtgtgaaattaagaacaaaccgcatattactcagactgaaaaggaatagtttagatatggacagaagctgcctgaccatgtatgttttaattttaaataatacatctgttaactgcactaagatgatatctcatcttatcgtttttgttttttgatacttcatcttgacagcagcttagaatttcctatttatcttctgcattactttctttgatatttaagacagataaataactagttgtgtttgcttagtagttttgttttttaatctgaggaattgtgtggctgattttttccttttacagtgaagtttaatgctttgtcttattctcctgcagtggggcccaggctttgatgagtggttcaaaccccatgctgggctgtaacactggtgccataactcctgcaggaataaacctgagcggccttctaccctcaggaggtctgctaccaaatgcactgcccagtgcaatgcaggcagcttctcaagcaggtcagaatgttggaaataataacctctaaaaaaaattaaagtatatgctaaagtaaaaatgtaattttaagagtaatgctaaaggcatttaatgtcattatttcatgaagtgttgtatcacatatatttcacttaaaaagcctttaaaagttctggcatttgaattaaaagtcttctagcagtcaacttctgtggaaaacttggtaagcctgtgagtctgtgcaaatctttcttctgctttccaaataacaaaattaattttggtagccttattgtcatygtagttatattccagggaaaataagtgtattttgaaaatatacattgtgtacaagaggcaactgcatcgcagttaagagcctggattctggagccagactacctcagcttgaatcccagttgtacagcttaaccatttgtgtcatcttgagaaagttacctttgtgtttaattttcctcataaataaaatgggaatagcaataaaaacttacctcatagtcgtgaggattaaatgaaatataatacaaattatgtgtttaaactgtgcctgagacatgataagcattcttttatttaggagtagttattacctatacaggaaaacagttataataacttgtgcttatttttttgatgctctttaaaataatgtattataatatcttgaaacgattcagtttcacttgaagaaaaatgtaataggaaaaacaatctagaaaaatttattaaaaactttcttagttatgagaaagagaacctagagaatataattaaacatgctaacatgttgctgtaatttcctaattctagctagtgttcttattttaataagcataagtgtgccttagtgcgagaagtcctggaaatggacttcacatcttgaacttaggatatttacatgtaactactagttgtaccagttacatgtggcttcagttgctaaactggggttctacagaagtcactaaatttttcccccttatcctcagttcagtttgctctaaagtgggaataaaaatatctccagttggtacttaagagaactaaatgaagtatgaaagtgcctttggtaagctagaaagcattatacagatgtcatccacttttaaaagggggttaagccattttcttaaatgagaatttttccagaaagggatatttttgccaaatttcagtttcttatacaaggcttcgctagtgttacatgtgcatttcttcccttaaatctttaaaaaaaaaaaatgatatgatagagaactagatacatttttaaatagtgttcaaattagtatattttgttagcaaaatatatacataccttgagaccaggatcaacaaactacagcacacagcctaagctagaaatggttactacatttttataggattatgaaaagaaaatgcagcagaggccatttgtgctcacaaagcccacatgatggccctttattgaaaacgtttgtcacccccagctttaagatatgctctgtgttaatgtaacagattttttaggaataagtttaaattaacagagcactgtttcctgactctgttttgatctttatacacaaattgcaacattctttagcattctgattaacatttttagttaaaaaaaaatagcataaagcacaccggttcttagagatatgattattatagtatactatgtagcattgagaaatgtaaatagatgccaatacctggaatgtatttgcacagcagtgatagttttgttatattcatggtgttcacataattcttgattactctttgttcagccaacagtcagaagaatgaaaaagaagtcccagtttctgaaatatagaatataatgtgcatctggtgcttcacaactttgaataaaatctcagtattgataaatattgaagacaatcttttgtttttaagatatttttgaagtatggaaaataagcacatctatgcagagaatacataaaattattgtacttatatatactaaagtataaattattttcatgtgtaataaactttcaattctgttataaccatgagttttatttaacaggtgttccatttggtttaaaaaatacttcaagtctcaggcccttaaatctactccaggtaaacctgaaatactgcttttgattaaattttttgtacattgactttttttctraacaatrtatatctatatgtatcagcacttgaaattctgaggtctgtttagattcttctaagggtgtggttattattgctacctttgtatgatcaagcggataaagagaaagaatcagtatcctatataccacactttggctccagtagccctgcctaattaagaactagctgtgctagtggggagaatttgcacctaccaaggaggatacttccctacaataataatagtggatgtatttagaaaataattgctttcccaacagatgttttatgtatacatatatgtaatactggtttttttttgtgcttgaaggagatttaaaaaataggtatgtgggccgtacatggttgctcacacctagaatcccaccactttgggagacccaggtgggtggattgcttgagctcaggagttcgagaccagcctgagcaatatggtaaaaccccatcactacaaaaagttagccaagcgtggtagcatgcacctgtaatccctgctactcaagaggctgaggtcggaggatcacttgagcccaggaagtcgaggctgcagtgagctgacattgtgccactgcattccagcctaggcaacagagtaagatcctgcctcaaaagaaaaacaaggggggtgaatttacaacattcctcgtgttatgctaggtcctctaatttaaagaaggagtaagctttaagctagtagtttggaaaatggatagacgtgactataaagatctggatatgtaacatagtagagctatggattgatgggaaataacaataacagatcagccaccctggtattcaggattaacaaatcaggaaattctcattagagctaaaatttaaaacttgtttcctatatacgatgcagtatgtttacagactaattgcagaacaatatacttataatatgggcaagcccacaaattgcatttgtttatttagcctaccttccggcatattgcttttgaaattttcttagggatcagtctcagtgttaacaggaatggaaatcctttagtttgttatatttttctacatttactgtatactgattgaggaaggaacatttgatctgtgctgtgtctagatttacctaatgatgagctgtgatggatatagatagatactttgacccaaggattttttattttttttttattattatttttttgactatacagacctaagagttctgtatttggtattgtcttggacattctcctaaggacctcaaagtggtccgtatataaacccctatagcttaaaatggaaaaactgtttgttttttggtgcatttgaaaagcattgttttcccttttaacctggagttttctgagtgcttctttaaaaattgttttttaatttggattaaattcaaattagatttgaatgaaagagaaagtagtggtctacagaataaatatggacatctaaatgcactttcttttcagctttgaaattcctcactgtgttatacaaaagatcttgtataatatttgtgtttttggcaaaactagaacaaatttatgaggggtggcttttcgtagtatacatttctgattcataagctgcttgtttgtactttctaatgtatttagtgctcttttgtattgatgtataaaaagagtgaaatgaaaaatagcatgtgaattggaatagctaactactagcttgaagcagaaaaatttatgtttaagagtattagcatacttgggagcccaaagtaataggacttaaaaacagtttctaaataggtcttttttttaagggcagccaacttgttttttctttacctgtttcttcaataactagaagagtgacacatagcaaatgatccaaaaatatttgtagaataaattyaaatatttgatataaaatcatgtgaaattggttaatttttgtttaaattcttaatagcttccaggtggttcacttatttttaacactctgcagcagcagcaacagcagctctcccagtttacaccacaacaacctcagcagcccacaacttgtagtcctcaacagccaggggagcaggtatggattttctagccttccatatgcttttacatcgaatttataacattttttggtatattccaagcatacttcatttgctttgttagtgtaaacatttcctgtactgtttttattaacaatagtagcaatcagctattgggtgtgtattcctaataaaacagtcataccatactgaatagatggtatcacctgcatcttgcatagatgattgagatccagataaatggcttgctcttagccatacagtgagtggcagagccagagattcaaacctaggtctttgtgcccctatcactcatgtattttctaccccatcattatctttctgtttttaggattttgttgctattggaataaagatatccctattatcataaaatgtagggcagtgggaacacagacaaaaacaaacgtgtacactgccaaagggaaagaaattgaataagaattgcaataaatgacagtagaagaaggaagtacaagtgtttctaaactttgggtacactggagtcatctgggaaattaaaaaaatattgattcctgagtcccaaatccagagtttctctatctcacaaattatatgaaatattcaccattagtccttttgcccagtttcccccagtcaggtcttggttggataaagctcatcctctaatagagtcctcaggaagggcacattaaaaacttactgttttttcattctaaacacattaaagattgcttggctagatataaaatctttgattttcttttaaaaaaattaattttaaggtacacataaaatttaccattttaacttttttttttttttgagacagagtctcgcgctgttgcccaggctggagtgcaatggcacaatcttggctcactgcaacctccacctcctgggttgaagcgattctcctgcctcagcctcccgagtagctgtcgctacagacatgtgccaccacgcccgactaattttttttttgtatttttagtagagacggagtttcaccatgttaggatagtcttgatctcctgacctcgtgatccgcccacctcagcctcccagactgctgggattacaggcatgagccaccgtgcctggccaaaacttaccattttaacttcttaagtgtgcaattcagcagtgttaagtgtattcacattgttatgcaacagatttctattatagaactttttcatcttgcaaaactgaaactatatctggtaaataacaactcctcccctcggccactattctactttatgttagtatgagtttgactattcaagatacctcatataagtgcagttatatagttatttgtccttttgtgtttgacttatgtcacttggcataaagtcttcaagggtcattcattttatagcatgtgtcagaatcaccttcctttttcatggtgaataatacttgtatataccatattttgtttatccattcatccactgatggatacttgggtatcttccacctttcggctattgtaaataatgctagtgtgagtgtgagtgtacaattatctctttgagaccctgtcttcaactcttctggatatatacccagaagttggattgctggttcatgtggtaatttttaattttttaagaagcatcatactgttttccatagtggctgtaccattttacctaattcccatcaacaacatacagagatctcgatttgtccaaatcctcgccaactcttgttattttctggtggtggttgggtctttagggaattttttttttttttttttaagcagccttcctaatgggtgtgaggtgataatcccattgtggttttgattggcatttccttaatgactagtggtgtggagcatcttttcatatgcatgttggccatttgtgtaccatctttggagaaaagtctgtttgggtcccttgcccattttttttttttcagattaatttttgttgttgaattgtaggagttcttcattcttcatatacacatatatcagatgtttgatttccagatattttctcccatttgttgtcttttcactcttgattgcatccattgcacagaagttttttttttttttattttaatgtagttcattttctctttttacttttcttgcctgtgcttttggtatcatattgaagatcattgccaaatccaatgtcctgaagcattttcacttgttttcttataaatgttctctagttttaggtctcctttaaatttattaagaactcttcctactgttgacttgctttatatgtttttgagaaatctgatgccagtctaattatcttgctcttgtaagtttatttaagcagtttgcctagaggccctgaatgcttgtctaatattttcactggtgtgtgtgtcagaattgatttttccatgtttttcctgtggatccttttaatgtgtagagtcacttctttatttctggaatgttttcttggatgatagtttgtagtttcgtaagtggaagcttagattattgtgttgaggtcattcttttctaaaataaacaattaatgttayacatttccttctcagtactgcttaagccactttccacaaattttgatatgctgtgccttcattttgttccacagaattttcttatggattcctcttaaatcagttatttagatatgtttgatttccaaatacttgggaattttccaaatatctttctgcagttgatttctagtttaaatccactgtgatctgaaaacatatttttggttcttttaagtttgttgaggtttgtttaatgcttgagaacgtgatctgtcttgatgaatactccatatatggctgaaaaaatgtatattctgctgttaggagtgttccatattagatcaaggtatttgatggcatcattcaggtcttctatatccttttctttctgtatgttttatcagttactgagagaagtgttgaagtcttcaaccaaaactgaaaatttctatttttccttttgctaaaggttgttttttgagcccatattgttaggtgcatatacatttaggattgttatttccttgattaatttaccccttatcattaataaatgaccttctttatctctggtaatatttcttgtttctttcttttgattaacgttagcttagtacgtcttttttcatccttttagttttagcctgagtccttttatttcttagtatttgttttcttcttcaagatgtttgtttaatcattattcctccttgtttgaatattccatttgtggtggtggcttatagtctacattaggtttgtggagtgctttggggggaaattgatatcacctgtagtttttttgcattttgagtttttttgtttgttttatcatagctccgttatggtggtgatgtggtctgccttattctgttgttcatttcatgaactgggttccaaattcaataatgtgtcctcctttcagctctgtgctcttttgtccaatcttttatatccagggagatcccctcaagataaatgtaacttttgaaatgtttggcttgcaattatatactgaaatgttacttcagacactattttaggtggtaccaaaggatgtcttttgcagagcaaaagtttttaattttgctgaagtccaagttaacagtatcttttctttatggaatatcctctagttttcatgtctcggaactctttacctagctctaggtcccaaagattttctcctgtgttttttttctaacagttttatagtttcttattttgaatccatgatccattttcagttaatttttgtacaagatgtgcaacttaggtccgtgttttgtttttgtttgtttttgttttcctatcagtatccaattgtttcaataccatttgttgaaaaaaaagaaaacaacaacaaagaaaaaaaacagctattctttctgaattgaattacttctgcacatttgttaaaagtcagttgggtctatttgagtgggtctatttctaggttccctgttctgtttcattaatctatgtgtctctccttcagccaataccacactgtcttgttcattgtagtgtcttaaaattgggcagtgttttctcccataccatttttcaaaattgttgtagctaatgtaggttctctacctttccatatacattttaaagtcatcttgtctatatctacaaaaaccttgccagcatttctaaaagaattgagttaaacttgttgatcagtttgggggaagaactgccatctttatgatgtgagtcttccagtacatgaacatagtatatgtccttatctagaccaaagtcaatgttttgtagtttttggtatacaagccctgtatatgttttcttagacttaagattaatacctaagcttttctctttttttttgagtaattgtgaatggtattttttttatttcagttttcacatgttcattactagtatatatagtgttgatttttgtatattggtcttgttttgtgccctcttactggacttactacttctaggagctgttttggagattgcttagggttttctaccatatagacagttgtgccatttgaaaataaggacaattttattttttcctataaaatctatataccttttatttccttttcttgacttagtctgctgactaaaagttccagcactatgtttatgttacaaagggtgttttaagctttaaaaaattgtttcagtgaagctttataaaagccttaggcgttatctaggtagcattaaacaataaatacagatgcactgaaaaatgaagttttctttgttcaaataccataaatttattcttgcttattctaaatacctttgaagtattttccttgttattctttttacaagactagtctaatactgctttctttcatataggaaaaaatactgatttcttttcaccagctcaaatttgtttttctttcttgtacaagtcatttattatttttttattcagggttctgagcaaggttcaaccagtcaagaacaggccttatctgctcagcaagctgctgttattaaccttactggagtaggaagttttatgcagtcacaggcagctggtaggtatcttcataactttatatgctgaatttactaaacatatctaatctatttgggatctcaccgcttaaattattttcttttccttcccttgcaaccagtaaacaggaaaaagtaaagctataatgtgtaaactattaaattgattgatggctgagattttttttcattgatagtggattaagagctttgacttaacataattaccacagttgtgtttccttgttacagtttactggcaaaataattatccactttactaggttaccagagctgttttcagtgtttgccaatagttatcttaattaataacttttttgttttcctgggttaagactgaatttttctagattgcataatcttttgtctcgttctggtaacttgtagttgcataaatgacttaagtcttaatggtcaatagcataacttctgtaagtcacttttatcatttaaaaaaaaagattaaattacttctcaacacttccagcagtaaatggtgaactaaagattactcttaatgattatcctgtcagttgaagacgataattctaacttcctgtcagttgaagacgataattctaacttcctgtcagttgaagacgataattctaacttcacacttaattaaaagagtaagccatatgtataagaaaactatgatargagtttgaggattgaatgagtgactgtgttgtcagcatcttatcactgtgggcttactatgatgcctttagaagtcttttagaatgataatctttattttggaagtcagttatccttacatataaagttccaatttagaggtagtgaatttccaaatagaagtttatataatcatatacctttatcagaccaattgtgaatttccgaaaatagctgtagtataatttagtggaaacaactctagtctgaaaaaaatcatgagaatgttcttagccacagactgccatacttaactttgagtctgagtcacttaaatcatgttggccttcaaacttccccatatgtaaaatgagtgttgaactgattactgtggtcccattcagctaaaaaaataacaaacaatgcttagtctcagttcaccacctttattgttagtagagtagtctgatattcattgcagcatcttttgtttaaagcaattgtctgtctaccagctttgttgttacaatagtttggatttcttccatctcccttctcctactttgttggttttatttcaaaaataatatactcttctaaacaaaatagcatcaatatcaaattttatacagatgcaagagaagagaggttcagtgctttgatacataatgcactcccttctctttttgtgtccagaaagttccattatcagtggtacccccaactaacaggagaccatatactaaatttattctgaaatgtctatgatttgatacttaagattaatcatactgctaacttttctattatttcattttctatgttgtccttttctaaccctggtagcyttcaaactttttgactggcctgctttccccttctcctctctgtagtgttgtctcagcttggctctgccgagaacagacctgagcaaagccttcctcagcagagattccagctctcctctgcctttcaacagcagcagcaacagatacaagtaatccagcaacttcactctgattacatttttaaagatactcagctccaaaagtacctcaaaataacttgctttagttttattttactgtcttttaagactgtacagtaattggtaaataatttagcaaattttaaagtctgacattttagccagtcaacttggagcactgaatatattttgtatatttaagccatactctataaaatttttcatgaagtgctggtggcacattaacatacatttttctagtatgcagtatattttgaaagacagttgtaagtgccaattgttaactttctaatattttactgcagaaaagtgttcctattagtaaatgtcatacctgtttatttagaaaaatgttataccataattttaggaaggaaagtcagcatattatagttgactatcttgatattcagggttgttttatattgctataaaccatcattatacaacaaaatggtaactgaagttgctgagttactacaatatagactggcagggcaaagtaacaaataattttgaagtttgccaagaatcatttttaaagcccttagcaggcttctgtgccactggtgctgtttgactgtgcattgtctcaatgtggtatagtccctttttgttatcttggtgctttctccctttttcagttgtgttgtttcgtcactcaggaaaagcacctttctacacctgcctgcatttaacataactcgatttttttccctcccttttgcagcagttgcgattcttgcagcatcaaatggctatggcagcagcagcagcacaaacagctcagctacatcatcatcggcatacaggcagccagtcaaaaagtaaaatgaagagaggcaygccaaccactccaaaattttgagtcttgcattactttttgttccttttttaaaaacacaagagcactgaatcaaaagaattgagtttctactttttgttttttttaatgtgtcagtattttacattgctagatgtacaaactttatacagaagcacaaccttatcatttttaaataaaaacagggaaatggtttaacaaactagggttggtttgcctaagtcattgctttttaaaaatggtttcactatacataatatatatggaagygacctaagaaataatagaaacatctttcagaagaatgtagtttgatatttatttagtataaaacgtttgtgcacagtgttaacaaatacaatttttacaaatctgttttgaaaatgtggtggctgtttatttgggtttcatastcttaattacttcatccatcagttttttaacttctttgtgtcttgtaactgctcggctcatacagtcctgaagtttagctccagttagcccacttccacctgaaaaattattttgccaatacttttaatctcagttatcattccttttcaaaaaacattaatgtcatgtcaaattataaaacaaaaaaattggataatgtaaatcagggtacagtctcaagatctacaagttagtttcacaagacctccaagtgattctaatgtatgtcttaagtttaagaaccactgacatataccattaagatggaagaacattttaggtagctaagaaactatactaaaattaggtaaataaaatatcccatattctatttggccctccctaatttaaggctcacactgagttttcatctacatatgtttaggactgaagtggcgggaacatgcctggtttgtgaagacaacagagtttgccttcctcatccattactattgttaaggttcctgttgccagatgttcctcctctccagtagggtcaactataagcaaagtgctataaaaagaaaaaaatataagttatcaatccatggaacaaattttactttaaaatactaaacatactatcagcctcccaagtagctggaattaacaggcacacgccatcacacccagctaatttttgtgtttttagtagagacagggtttcaacatgttggccaggctggtcttgaattcttgacctcaggtgatcccctgcctcagcctcccaaagtgctgggattacaggcatgagccaccatgcccggccctgctcttctatttctgaacgtgctaaaatccttggaaaatattgaagatagcttcagataaatcttatagtgaaagaattggaaattaacattacacaggtataagtaaaccaaggaacaggtaataattgtgcagtgactagaaataattgtgcagggacaagtagaaactcaagtgtccagggaaaactaggatgtagggtcaccatagcacttcctaaagagttagaatgctgaacatcaattaccctaatcttaaatatagaaaattttaaagtaagtttgattaacttactcatcaaacacagcaaaggaagttgcaactggatgagttctaatattcaaataacttttcttctttaaattaacttctgctaaagcagtttcttcatttatagtaacttcaggcaactgtactaagaaaaggcaaatttgtaaagtaagtaagtctctaagaaacaaatgatttctaagcttttttttttttaattcacctttccctctatttaacttgcccagaacatttctttttaaaaagcaccttacagccactaaggtaaatatagaggatatacattgcttttcacaacatctgacattcctacctagtgcttattgcataatttttttttaagtttaagaagtcaatgatttttttttaaatttatatctgccaggtactgttttaagcattttcatattttcattgtattcacctaatcaatactcttacaaagtaagtactattatccctattttattatagataaggaaacttcagcacagagtgagagagccaggaatctactttaaccagtctattataatattttgctgacttcattttctacctccaattcacttaaccactctactataatattgctgtgctaactttatattccacctccaattatttgttcctaccaattcatcattcatcaatgatagggaatatgcacaagttattgaaatctgtaactaatcagtcaacctagactccttgctaagaaacttccctattactatggcctcacagtaaaaacaacagaatccattctacttcttttggcaatatcacataaagaactatgaggatactggcagatcttcaccaatcacctagccagaagttacaactcttgtctccttctcccaccaatattaacactattttggaaaggactgaagtcctaacttaagtagatgggtacagtcaaagcagcactctaaagagcattcagttagagaatatacaactatcaactatatttggaaagtcatgtcagcattacattcattaatttggaagcatacgaaagcaaatgtacattaaaagtttcacaaaacaacattctaacccatgagtgggaatattgccttttttgtaaggctgcttaccattttttaaagccgctagcaaagcaaatgtgcaggcatccaaaatgtttccatcgtagtcgaggcaaatgagatcacagtatagaacccagacaagctaaaatagaattaaacacaaaaggaaattaaagtcttctaatgggtagaacatgctattcgcttagacttaagaaccacagaacccttggttaaacaagcaagataactttcaaggctcaaaaaccttaagaaaatgcttcacctttttaaagttctatagaaaaccagaagaaagtggacaggttttgtgaaagctggcttttgattgccaggctgacaaatgacaaacatgtccatttcccttaatggagctacagatgtagaaggaatttccattctcattgggaggttacagataagggagatggttttgaaagccctagctaaaattcaaaatgcactttctcataatacatgaaatgtttaagttttacagtgctaatgtatcagtttatatgatctagtaggaaagcctctctaggttctaatcaacctagttttacattttcaaatagactttggaatctactgtgtggattcaccataaacatatgttaacatgattaatgttataatctgctataaggaataaaaaatgattgaactttaaaagttaagggggaaaaaaattacttcagtttaaaaggtagctcccagacaggcagtaagttagtcaaacttgtttttttataaacaatatggttcatttagagaattatagagtaagaaattactgaatctctaaaatctgtaagacatccatatttaaagctactttgattggtggttttaatttccttgttcactttcccccacaaaaaaaaaatcccttcagaattaataagaacttatagcttctctattcctcttacctttcctggagaaatgcataagtcctctttctgaattatctgtgaacttgatttaatgacaaagagcaaagtaaatgaaaagcccaaaactatctgaaaatgaattgtaataaaattttatcatggtgctcttacttttcaatgacatctgcaatgaactggctagccacttgggcctcttctccaggaggtccagaccggaatctcgatgaacacaggggtggtagatccacattaggaactgaaagaaacactctgcagctatgaactaaaccttttttttttttttttttttttttgagatggagtcttgctctgttgccaggctggagtgcattggtgcgatctcagcttactgcaacctctacctcccaggttcaagagatttccttgcctcagcctcccaagtagctgagattacaggcacacgccaccacgcccggctaattttttgtattttagtagacagggttttaccatattggccaagatggtctcgatcgcctgacctcgtgatccgcccgcctcagcctcgcaaagtgctgaggttacaggtgtgagccaccatgcccggcctaaacttttcaatttatggattactgaagtgttaaaggtattatcaatccacagtaaaggcaactgtggccatggacaggctcttctgagtagaatacattgtaacattatagttatattctgtttggtctctctaagactcccagccatgaaatttctatttttctgacatttttcccccatatgcctttttaaaaaatctattttagacctcaattctaaatcctttacgagttttcctgatatctttcaaaatacctcaatctgtaactgaagtatatatagcccctctgctaacatccaactgtttttctcatttaaaaaaaatgttggttcctaccataaagaacagatggttccaaggcaagaaaaaaatagcagttgtataaagcaaagaatctttatggaaacaaaaggtgtgcaatgacagttctttgactaaaaaaaattccattctattttttttttcttttgaaacagggtttcactctgtcactcaggcttgaatgcagtgacacaattatagttcattgtagcctcaacctcccaggctcaagcaatcctcctgcttcagcctcccaagtagctgggacacaggtgtgcactggcacacccagctaacttgattttttttgtagatacggggtctcctttgtttcccaggctggtcttgaactgctgggctgaagcgatcctgctgtcttggcctcccaaaatcctggtattataggtgtgagtcaccacacccagccaaaattctattttcttggttagtaacttatgaatgtataaacaaaaattgagcaaacaagtttgataaaggttaaatttatgaaattctatatcctgctattatgctatcttttactaacacacggaaaacttttgaggaatttgttttattcataaatatttccgaatattaggaataattttctttacatcaacttaactaggacttaactaaaaattattaaatgtgttaaaagtatttgtattaaaattacaaaaccatttaacttaccaacgtatcctttatcaggggcatctgttgatggtgctgcaaattcctatagtagcaaagaaatgtttcctattgaaagaagctactgaaaaattatgaagacaatttagcaatcagttatggaaggctctatcaaatatcagcttagggaattgtgtcagggcctctacggacattggtgctgatcctcacaatagctctacaagataagaaggcactacagtacagtggactacactacagtgctgctcggcaagattacctggagatcttttaaaaaatagtaactgggtttgtgcccccaactactagccaagaatcttaatttgttctccagatgatagagcaagatttaggaactgctgctttagtggtaaagagcaaaagctcagctgggcgcggtggctcacaccggtaatcccagcactttgggacacagaggcgggcggatcacctgaggtcaggagtttgagaccagcctggccaagatggcaaaaccccgtctctactaaaaatacaaaaattagccaggcatggtggcgggcgcctgtaatcccagctacttgggaggccgaggcaggagaatcacttcaacccaggagacggaagttgcagtgagctgacatcgtgccactgcactccagcctgggcgacagagcaagactccgtctcaaaaaaaaaaaaaaaagcaaatgctctgcaattactaagccagttcaaatgtcagagccatacttactggctgagagacttcaggcaagttatttaacctcttaccttaaactcctcatcttgtcaaatgggaagaaaatagtgtctactcctagggactgttaataagggccaaatgagatagacctgttaaatcccaggcataaaacctgacaaggagcaagttctcaaatcttactgttatacatcactccaggtttacgaaagaagaatctcaactgaggttaaataacacagggtagactgtagtcaaagaagcacaggctttggagtcagatttatgtctaagttttacttatgagtcttatgtacctggacaggttactgaaagtcatctgtaaaacaggaggtgaagacaagtaacaaatgattgttataggcattaaagtggataattctgtaaagcacctaaaaaggtgtctggaacatagcaagtactcagtaaatggtagccagtattccctcaaatttttcttttcaacaatttcaattttctacacatttacacagattacatgtcatcactggctaaaaggatgtcaccaaaaatctgttaatgtctcaaatgatataacaatttttttaaaatggtgactcagattttaaaagttgtttcattttgctacatttgacaattgttcacttag

SEQ ID NO: 95578 - DNA, 27890 bp, Homo sapiens
  misc_feature (1)...(27890): n = A,T,C or G
ctgtaatcccagcactttgggaggccaaggtgggcggatcacgaggtgaagagatcgagaccaccctggccaatatggtgaaacatggtatctactaaaaatacaaaaattagctgggcgtagtggcgctcgcctgtagtccacctacttgggaggctgaggcaggagaatcgcttgaacccaggaggtgaaggttgccgagagccaagatggcaccactgcactccagcctggtgacagagcaagactccatctcaaaaaaaaaaaaagaaagtgagatagccttattactgatatggagaaagttttagtggtccggatagaagattaaaccatccacaacattcccttaaaccaagcctaatccagaacaaggctcgaactttcttcaaatctgttaagggtgagagagataaggaagctgcaggaagctagcagagttggctcatgaggtttaaggaaagtagccatctccataacataagagtgcaaggtgaagcagcaagtgctgatggagaagctgcagcaagttatccagaagatccagctaagatcactgaagaaggtggcaacactaaacaacggattttcattgtagtttaaagtcttatattggaggaagataccatctaggactttcatagctggagaggagaagtcaatacctgccttcaaaacttcaaaggaaggctggacgcagtggctcacacctgtaatcccagcactttgggaggctgaggcaggtggatcacaaggtcaagagttcgagatcagcctggccaacatggtgaaaccccatctctactaaaaatacaaaaattagccaggcatggtggcacatgcctgtagtcccagctgctcggggggctgaggcaggagaatcacttgaacctgggaggcggaggttgcagtcagccaaaatcgtgccactgcactccagcctgggtgacaaagcgagactctgtctcaaaaacaacacaaaaaaaaacttcagagggcaagctgactctcatgagaagctaatgcagctggtgactttaagctgaagccagtgcccatttatcattctgaaaagcctagggcccttgagaacttggctaaatctactctgcctgtgtctttacatggaacaacaaagcctggatgacacatctgcttacatcatgatttactaaatattttaaacccactgttcatacctactgctcacaaaaacattcctttcaaaaatgactgttcatggagaatgcacctggtcacccaagagctctgatggagatgtacagggagattaatgctgttttcgtgactgctaacacatcattcattctgcagcccaaggatcaggagtaattttgacctgtcactgtaattattttaaaaaacagggccgaggcaggtgtatcacctgaggtcaggagttagagaccagcctggccatcatggtgaaaccccgtctctactaaaaatacaaaacttagctgggcgtgatggcaggtgcctgtaatcccagctactggggaggctgaggcaggagaatcacttgaccccaggaggaggaggttgcagtgagccgagatcacaccattgcactccagcctgagcaacagagcaagactctgtctaaataaataaataaataaataaaaataaacaggggcccagacatggtggctcattcctgtaatcccagtgctttaggaggtcaaggcaggaggatcacttgagcccaggtattcaaaacaagctgaataacataataacatagtgcaacctcatctctctacaaaaaatttaaaaattagccaatgcagtggtgtgcacctgcagtcctagctactcacaaggctgagccaggaggcccactcgaaccaaggagctcagggttgcagtgagctatgatcacaccactgtactctagcctgggcaacagagactctggctctaaaatttaaaataataataataataaagtaacaaagaaacaaatacatttcataaggctatatagctgccatagatagatctgggcaaaatgaactgaaaaccttctagaaaggagtcaccatttagatgccattaagaaaattcatgattgaggccaggcactgtggctcatgcctgtaatcctagcactttgggaggctgaggcrggcggatcacctgaggtcaggagttcgagaccagcttggccaacatggtgaaaccccgtctttttttttcctgagacagagtctcactgagtggcccagtctggagtgtagtggcatgatctcagctcactgcaacttccactcccaggttaaagcaattctcctgcctcagcctcccaagtagctgggattacaggcacccaccaccacacccagctaatttttgtattttttnnnnnnnnnnnnnnnnnnnnnnnnnnnnnnnnnnnnnnnnnnnnnnnnnnnnnnnnnnnnnnnnnnnnnnnnnnnnnnnnnnnnnnnnnnnnnnnnnnnnnnnnnnnnnnnnnnnnnnnnnnnnnnnnnnnnnnnnnnnnnnnnnnnnnnnnnnnnnncctggcctgaaacccatctctactaaaaatacaaaaattagccaggcgtggtggcgggcacctgtaatcccaactactcgggaggctgaggcaggagaatcgcttgaacccaggaggtggaggttgcggtgagcagagattgtgccactgtactccagcctgggcaacaagagcaagactcagtctcagaaaaaagaaaaagaaaaaagaaaattcatgattcaatggaggaagccaaaatatcaacataacaggagtttggaagaagttgattccaacccttatggatgactacaaggggttcaagacttcttggaggaactaactgcagatgtagtagaaattgaaagagaactagaattagaagtggagcctgggacgggcacggtggctcacgcctgtaatcccagtactttgggaggccgaggagggcagattacctgaggtcaggagttcgagaccagcctgcccaacaagacaaaaccccatctctactaaaagtataaaaattagccaggcatggtggcgggtgcctgtaatcccagctactcaggaggctgaggcaggagaatcacttgaacctgggaggtagagattgcagtgagccaagatcatgattctatctcaaaaaaaaaaaacacacacagaaggtaaattgttctgcaaagagaggtaatgggaatgtgggagttggcttggctactggcacagacagcagggaatcgggagtttgaaagaagatttacatttggcatacacgtgtgcccacgtggcctttcctactgcaaagggtgctgacaaaatcaagcccctgatccttcctgtggcatacataagaacaaaatggtagttgttagggacaaatcaaaatttaaaaataaaatggccaggtgcagtggctcacccctgtaatcccagcactttgggagggaggccaaggccagcggatcacttgagcccaagagtttgagaccagcttgggcaacatggcaaaaccccatctctacaaaaaatacaaaaattagtcgggcatgttggcacgggcctgtagtcccagctactggggaggctgaggcagtataatcaatcacctgaacctgggagatcaaggctgcagtgagccgtgatggcgcctttgcactccagtctgggtgacagagtgagaccctgtctaaaaacaaaacaaaacaaaaggctgctagtcagtttgggctactataacaaaacactggccaggcgcggtggctcacgcctgtaatctcagaactttgggaggccaaggggggcgggaatyacctgaggtcaggagttcgagaccagcctggccaacatggtaaaaccccatctctaccaaaaatacaaaaattagccaggcatggtggtgcgtgcctgtaatcccagctactcaggagactgagacaggagaatcgcttgaacctaggatgtggagattgcagtgagccaaggtagcgccattgcactcccgtctaggcaacagagcaagactctatctcaaaaaaaaaaaaaattaaaggcttagttctccatgttgaaagtaagggaagagacttctccaccctctcttttcttagaaaatttgctttagaaaacttgtaaaattttttttttttttttgagacaaagtctcactcttgttgcccaggctggagtacagtggcacaatctcagctcaccgcaacctccgcctcccgggttcaagcaattctcctgcctcagcctcccaagtaggtgggattacaggcatcctctaccacgcctggctaattttttgtatttttagtagagatggggtttccccatgttggccagactggtctcaaactcctgacctcaggtgatccacccacctcagcctcccaaagtgcggggattacaggcgtgagccaccgcacccagccagaaaacttgtaagttattttctgtgtcttcaaaacgtgtataaatatttttagaagccacacagcctcttgccagctttactacccagggatgtctttcacaaagacccaggagccatctccttgaaatgtaaacaccaagaaagatggagccttcatttcccagtttctgtgggagggtaggactaacttaaatggacactttgcttgagctgcaaaactatctgctgtcataaaaatctgaaaagctggctgggcatggtggctcacgcctgtaatcccagcactttgggaagccgaggtgggtggatcatctgaggtcaggagtttaagaccagcctggccaacatggcaaaacctcgtctctactaaaaatacaaaaactagccaggcttggtggtgcacacctgtaatcccagctactcaggaagctgaggcaagagaatcgcttgaacctgggaggtggaggttgcagtgagccgagatcacgccactgcactctagcctgggcaacagagcaagactctatctcaaaaaaaaaagagaagtttttcttctgattaagccagttagctaacatagatggtcatcacaattgccaggtgtctctagactgcactatatgtgacaaatggtgctatcgagtcctcctaaagattatttatagtttatcttgagaacacatatgtaatgggctgtatctgcttggctagataaaagtgagacttccttctgtctttgcagtctcttagcaaactgcctgtgatgtgctcacattctggtttaatgcttattcaataataaaactgttttctttcttcactactttcgtggagaggttttttctgggttgggagaaaattttgcttctaattatattctcccaacatagcgcatgtgcttaaaagggaaacaaaagcaggagggggaagggtctagagtgataagagctctagtgagaggctaggcctagagagggacatggagaaatagcatgcggagaggaacggtagaggagcaacgctaacattcagttgtaaataatacaatcatagcagctaatacatagagggactacacgccaagcactgttctcactgtttagccatattcactcatttagcatgcgcagtagcttgaatccggtttttcaattattcattccctctctctgcacgtggccgtagagtacactagagtgggcagaaaataagtcacaaaacagcaaagaaacagtgcttttggaagtaggtatgagacaaactcttttctaggcaaaagtaacccacgaaaatgtgtgtggaaaggccagatcctactattaggcaggatgggaatttgagccattttatttggatattacagaatggggtgaccccagaaaactggaagaactggggaccagcaaatggccgacctgcagtcctgagcagaggatgtaggccagagtggacctagaagataagaaagggaattgaatccagtaagggacagacactttatttttttatttttatttatttatttatttatttttgagatagagtctgatctggaggctggaaggcggggctaaaactcccactcacttacctcyaccaacaactaggccaccaagtcatttctgaggactggctcaagaaagcagatttaacttacactggcctagcccaggccaccagatgcatccacggagatccaaatgcatataatcacttgaatcaagatctagacagggacgcgtgcagcaggcttcatctgactgattcctgacacgggagagaaagcctaagctccgaatcatccttcaatgtttacaaaggccctaaatagcagtgggctaattgctgttcctggatttccaggagacctgagacccatgaaggagcaggaaagagcttggggataaaaaattaatctggaacctactggagcggaaggggctgcactcacctggaaaagacaaagttcttgggaactggccacgtaggccaggtccctaagcaattccatcccgcaccctaacaccccgactggtgttcctgggtccctaacattgtctgtacccgcttcggaggttggacaaaatgagtttttcactgccctgcctcaggcctctctcaaaggtctggcccatgatatttggtgtacattgggaccccagcgcccagatatttgaaacggggtggggagcgggtgttgagctgctacatttccaggttctaggtaccctggggaacccctggtcgttgacggaagcacagcgttcaagggcggcagagctcaggtactggaggacacatgggccgcgccgggtctagccrcgggacatccccagaccccagcacggcctcccaggccgaccttccagaagccggcccactgccttccccgggtcccagcccagaaaagcggagaccttcccctccgtttggaagatggactcatcccctacttcctcctggctccmcagaagacctggagacctcgggaagtgttctcatctatgttcgctccaacccgggggctcagrcccacctcgatyccgccttcccgggaggtccaggaaggtcccgccgcacccaccccgttggcctcaccctggctcgggcccctttatcatcctgcagctacgctccgaccaggargcacagccagtccccacagccggctctaccgctctgctcgcaggtttgggctagtctggggcggggacttgggagcgcctaaaacttgcgaggagggcggggccgcagaccggtcctttaaaggttggaagtggccccgaggcgccggcagccctgggcggtcccgggaatcgcacaggacccggctcccctcgcctaagctgctggggggcgccatgggccgctaccgcatccgcgtggccaccggggcctggctcttctccgggtcgtacaaccgcgtgcagctttggctggtcgggacgcgcggggaggcggagctggagctgcagctgcggccsgcgcggggcgaggtcagcgcggggagcgaggggagctagggcagcggggaccccgggcccaggcccgggycgagctgggctcgcggcgggagggcgggaggctgggggcgaggtgacagcgcgacctcgcggactgggacttccacgaagctgggacgaggtgggcaagatyagggacagggtccgcagctgggatcccgggctgggctcaaccccatctccctttcccgcccctggtcccggcagcccccagctccttctcccagtgacccagagccaatgtaagtatgaggccagaggtcagacgtgaagctcctccaagaaccggcgcggggagagctcagttaatgggacccacgtgggcgatgctgctccagcatcagctccaggcgctgcgggccctcgtcctccacccgactccgggcgtctgagacccaaagagcaggttgtgcgggggcgggaacgaggcgatgctgtctttggaggccctgagaaactgaggttgcacaggagcgcrgctctgtcctcgaaacggcctcagtygggtccctcctactaagtctggcctgggtccggcctgcacaggaggaggagtttgatcatgacgttgcagaggacttggggctcctgcagttcgtgaggctgcgcaagcaccactggctggtggacgacgcgtggttctgcgaccgcatcacggtgcagggccctggagcctgcgcggaggtggccttcccgtgctaccgctgggtgcagggcgaggacatcctgagcctgcccgagggcaccggtgagcaggcggcgtyggggaaggaggcacaaggtcycgggaactgctgcggggctaggagggcagagttaaggacggtcggagcagacttagaggakgtatgggcccagggcaggtgaaatgtagggatcccagggtgctggacagaaaacgggaaggagttatgaattcccaaagttttacacaggctaagagaggctgcgtgtgaggctggaggcagggagtaagtgatctggagatcccatcttccaagaaggcaaagacagaaagtgggagttgcagcgatccaggaaaacagagaagcaaagtgaaagtaggaaggagatgtaaaggtgactcagaagtcaggtgaggggaccacatggaacaggagggggtgggtgacccgtgagagcasacagctaagggaagaaaacataggatgctggagagctggtttggttggaataacacggaagacacccgtgaaagacaagaagcacactggcccgcaggagaygaggaggaatgaggatggcaaatagtgaatttttttttttttttttttgagatggagtcttgctytgttgcccaggctggagtgcagtggygcsatcttggctcactgcaacctccacctcctgggttcacgccattctcctgcctcagcctcccgagtagctgggactacaggcaccccccaccacacccggctaattttttatattttttttagtagagatggagtttcaccgtattagccaggatggtctcgatctcctgacctcgtgatcygccctccttggcctctcaaagtgctgggattacaggcttgagccaccacgcccggcccaaatagtgaatttttaaccatgggtaatgagtaaaagagagatgaatccagagatgagtgagggcagtagggatggaacatcaaatctatgactttgagacaggtgagtgtaaatgcagaaaagacccagaataagtccatagatacagattatgatagtaaatccagaaagatgaggtttaaaaaaaaaaaagcaaatgtagaatcttttgaggacaggtgaaggcgtggcaggtgaggtttaagatgtgaaattaatcaaagcaatctgtagtagacagtaggtgtaggtgtataggtgactaagatttcatcaccttaattaaggtgatttttttccaaccatagatattgatgaagtaaggccaggtaggggaagatgagtgaaggagcaagaaatggtggcaaacaggaggtttttatctacaggcaaaggatgagggctgaaataagagaaagcaggagtgcaaagttggcaaagatgggataaacrtgtctggtggataatcaaatgaggcaaagccagagataaaagcaacagtgcatggctgaaaacatggaatacggctaaccacagggagatgaggacaagaggcgggcataggaccagacagagccgtgaggccaattgtcttgatgtctccccagcccgcctgccaggagacaatgctttggacatgttccagaagcatcgagagaaggaactgaaagacagacagcagatctactggtgaccacccaccccttaaactaaccccgccaccactgtcccaccccttccctgcccctgcccctgcccctggccccatcactgaccatgacatccttcctgaagctttgtccccaactcctagctgggccacctggaaggaagggttacccctgaccatcgctgcagaccgtaaggatgatctacctccaaatatgagattccatgaggagaagaggctggactttgaatggacactgaaggcagggtgagaaaaaggctagacctcgragtgaaataagggctgggagggccaagaatgatgatagacggtgagggactgagggatcagctgatgagttaagcctcaatacctgtcctagggctctggagatggccctcaaacrtgtttacaccctcctgagctcctggaactgcctagaagactttgatcagatcttctggggccagaagagtgccctggctggtcagtggttccccgaggtctccataatcccttaatggcccstctggatgactcatcacactccacagtcccccgtaactcttygcaagaagagaccttatcatatctggtcaactcagagaggccttgagaatgaaaacgcagaagctgggttcagggagggttatatacctgaacccctggggtagattttggagaagggatatgcaggctgtggtacatatatcctcctttcaccrcccaccaaagagaaggttcgccagtgctggcaggatgatgagttgttcagctaccagttcctcaatggtgccaaccccatgctgttgagacgctcgacctctctgccctccaggctagtgctgccctcrgggatggaagagcttcrggctcaactggagaaagaacttcaggtacctctccttcccctgcctggcactgttctctccttagtagtgtggtgagaacggacagagagaatccaaactgagtcagaggaaggctgcagtactgcrttgccccttggtgcagtcctgtgctggaaaaatacagaaataaaatatgtaggggaagaaactatgaggagctcccagcaggaaggggaaaatagaatggatccccagcacacagagaggggctggagatgttagcaggaacagtgacattgcctggccgcagtgttctggactccagtgttcatgggcagggagaaaagtgaggaagtgccatcaggtggggagaatcggggaggctttctagaaaaagagagcggggtttggaagcaatggactgtactgaggacaagcctaggcaaaatgtgtgcgtatgcatgtgtgtgctgtatgcggtggcaggggtagtaggggaagctctctggaatatttggcagaggaygtgagatttgaatagggaatgaaagagcatttgctgagctgataggagccaaaaccagagcgcagaccattcgggaatgatcagaaaggggcctggccatttgacaggtggtcagtttacaatgcctgtgatgccaactggattgagcaggcctggttccaaacccagatctgccaccacatccacacacaagacatctaccctcaccagactgtttcttcactttaagatgagaggaactggaccaggggctctagttctcccaacaggrctccggtactgatgcaggagaatggcaagaagctagactaaatctcttgccctttgccccggccccctgggggtagactttgaactctaaaaatggatacatccctcctgtccccagaatggttccctgtttgaagctgacttcatccttctggatggaattccagccaacgtgatccgaggagagaagcaatacctggctgcccccctcgttatgctgaagatggagcccaatgggaagctgcagcccatggtcatccaggtaagggccccagacctctcccacaacgttgcactctgttcacctcaacctctgctcccagggacccaacccccagctcttggctcccaaaccccatcctcactcagtgagacttgtcttcatgtcactatttgcctgtaccctcrtctcccctgcctcatccaactagaattactttttcaagagtcaaaatggcctcytggagttctcatcctgtatccaatggtcctcacacttcagtgtgcatcagaatcacctgaatgcctgttgaaatgcagatttctggatcccatgaccagactttctgattcagtatgtctggggtgggaactaagagtttgcgtttttataagttccaaagtgatgctgacactaccagttcaggactacactttcagaatcactatctcatctctcagtggcctctggctctgaaccctcgccatctcttgaatatcttttctygcaatttcttttttttttttgagacagaatctcactgtgtcactcaggctggaatacagttgtgtgatcttggctcactgcaacctgcgcctcctgggttcaagcaattctcccacctcagtccctccagtagctgggaccacaggcatgtgccaccatgtgggcctggctaatttttgtattttttgtagagatggggtttcgccatattgcccaggctggtcttgaacttctgggctcaagtaatctgcctgcctcggcctcccaaagtgctgggattacrgstgtgagccactgcacctggccttctctcactattcttaacagtcaggtgacaagaactgtcaataatcttacacctcctacttctccttcacattccaccaccatctgagcgccgaccccaaagcagcaggtttctcccacaccactgttagggcctccttctggacccccttcttccagtccctcctgccttccacctgacatcagggcactccagctagcgagcggcaggctgggagggttcacagtcctcctgctagactataacctcctagaaggcaataatcttacttagtcatctctgtttccccaagaatgctgactataatgtcatatacggaatgggagttcaataatttctctttctcccagattcagcctcccarccccagctctccaaccccaacactgttcctgccctcagaccccccacttgcctggctcctggcaaagtcctgggtccgaaattcagatttccaactgcacgagatccagtatcacttgctgaacackcacctggtggctgaggtcatcgctgtcgccaccatgcggtgcctcccaggactgcaccccatcttcaaggtacttattaatctattaaatcacatatccctcagaccccagagagaggaacagccccatatcaaaagataytgcagcagcaaaaactctttgtagcaatttgtgagtgaagaggagactgtctcaatatcttgagatgttgattttaattaagtttattaagtttagtcacttaacattatataggaatcctctgaaattctcagagatctgacagtctagcagtgcgctcacagtagggcttgaacactgctagtaaaamaaaagccatattcctaccttagatctagtatttagccaraaaaacaagtgatgcccataagaaccaaccagagaacagtatctggtactagagtttgaaatcacaagggacagcctataacagtatagtattgatgaagaatgtttctacccaattgaggagtcagctaagtagaaacagaccaaaaggcaaggaagaacagccagcaagccgctcatacctgcccaacagyaaggtggatagagatgtaygttagcatggtaatgacaggaatgaaaaggaaagaatctaaaacgtagtgaagggaggaaatggtagctgcagcgtgcctgggtgcaagagagagaaaagccagaagtccaagcttctgccacacctgtaagtccctggggcaggtgtgttatactgacctagaaatactgtggttttaagagctgggtgtggtggttcacgcctgtaatcccagtgctttgggtggccaaagcagtatgattgcttaagaccaggagttcaagaccagcctgggcaacacagcaagtcccggtctctaaataaaaagaaagaaagaaagaaatactgtaattttataaaacagtgagttccatatatattgctgggagaaggcaaaataagacctgtgcttgcttaagaaaatgttcttaaaatcttgatgatactttatatacagggaacttggcagagggagcacaaaaatgatacaagcttacaaaccagagtaattgtcagaaacagtaaagttagaagaaaccagagtcagcaaaaatgaggtgtttggttttaggtacatggagtttgatgtattggcaagatatgcaagtatgtcctgggtaaaaacaaccaaattgtgtttcagctgggggcctccaccaagaccccccaagcctggccagtatagctgtgccgcctctggaattttccccttcggtaacatagacaagatggagaccagtctgatgaatggaatcttggatttcattcatctcatgctgtctcctgcttccccatcctctgctccacacgaacaagtgmagcctctattcacacttacaattccktttcctagttcagtcctctccgtgtctccactcaccacagtaatgccatgccccagcggacagctgagttgctggcagatgcacacaagggtcaagcctgcasatgtcttaacagtggcctatgcaggctctgactttggattgctggggtcttagtcctgaaccccggcctcaataatttccagatgtcctcacatgttccatcgtgaggttattaaaggttaaaatgacttaatggtgtgacacaagctaaatgctacaaaaaacattagttcttgcaaatttttttttttcagagacaagttctcactctgtcacccaggctggagtccagtggcgtaatcataactcactgcagcttcaaactcctgggctgaagcgatcctctaacctcagccttcagagtagctgggactacaggtgtgcaccaccatgcctggctaattttttttattttttgtagagacagggtttcrctatgtggcccaagctagtctcaaattcctgggctcaagcgatcctcctgcctcagyctcccaagtaacctggattgcaggcacatgccgccacacccagctagttcttgcaattattattattarggactgtttatccttaggcatcctttctcctcatgtggactttggcctttccgtgacatttggcatctttcatgaatcttctgaaaagcttcaggttaatgtgagctgctttggtatcttaacaccaaaggtgtcattggggtcattgccagtgtccagcatcaacaattcagacaagcaccaaaactgcttgaaacctgcatgttaactatgtggaaaggaagacaaacagtctaagataaaaagaaacgcatgtaaggaccatgcctttttttaatagctaaggaaaatattttaatatttttaatttaataaattttaattttaaataaataattaaaatttaaataaatttaaatttaaaatttaaatttaattttaaataaacatttaaatttttaattttaatattaaattaatttaatttaatattaatttaacttaatttaatttaatattaatttaacttaatttaattaatttaatattaaattaaattttaatatttttaattttaatattaatttaatttaatttaatttaatatttttaatttaatttaatttaatttaatttaattaaattaattaatttaattttaattttgcttcaatattaaattaaattttaatatttttattttaatattaaattaaaattttaatttaaaattaaatatttaatattaaattaatttaaatttaatattaaattttaatagctaaggaaaatattttaatattaaaaaaagaccatggccttttttcaatagctaaggaaaagcaggagaagaggggcccaacagtgcttaagtaggggtggagaaagatttgcttaaacaggtagctgaatatagctcttctagttctgacagaaagtattctccccatccatcccctaaagaaacccccaactgtgaaacaactaaaagatggagatgcagctttgatcataagcagagaggctagtttaagaggatgtgaatgacagaggaggtagcaaagaaaatcagaaagggctgattcataaggcacctatactcaaggtagaaacaatgaagcagacagctactattccaggactcttatgtgtaatagacactctccaacatcacttaggtgagcatcaccacagcccctgagataagagagtctattgctgccccctgttgacaaatgaagagattgcagattaaaaggttattaacttggccaagtctcaaatgaggagtaaagtgtaggttaaaatcctggtcagtctggctccagggcccaactcacagggaagttggagagcacaagagtgagtgatcagaacagcaggagatcagcctgtaaaggaaagcatcaagaggagaaggcgccatgctgggtgccaggccctaccaggaaggacccaagcatggcctccaccagtcacgccctccaatctcctcctctccagttcctgatcccccatatccgctacaccatggaaatcaacacccgggcccggacccaactcatctcagatggaggaatttttgataaggtgaggagggtacggggcatgggactgcctcatccatcyctccatgatctgccactttcaggatccaagatcaactatgtgtgaatgtcctcactcttaacctatgaacctgtcccttttatacccatgtctttttttttttttttttttttttttgagacagagtctagctctgtcgcccaggttggagtgcagtggcgccatctcggctcactgccatctccgcctcctgggttcaagcgattctcctgcctcagcctcccgagtagctgggattacaggcgcccgccaccatgcccagctaatttttatatttttagtagagatggggtttcactgtgttggccagactggtctcgaactcctgacctcatgatccacccacctcagcctcccaaagtgctgtatacccatgtcttaatatctgaaaatcccacatttgccccactttatggaagatgtgttggttctccagccctgtttccccctctaagacctgtgatctcctgtcccaggcagtgagcacaggtggagggggccatgtacagttgctccgtcgggcggcagctcagctgacctactgctccctctgtcctcctgacgacctggctgaccggggcctgctgggactcccaggtgctctctatgcccatgatgctttacggctctgggagatcattgccaggtgagtaaggaggagctgagaaatggtggggysgggggsgggggggctctggcctgaggccagcatggggcaaaagcaagaaggtccagaaaggagaagcagagaactcaatcctggggagagatgaggaaaagtgaggacacagtgggtggctctgaaaatgaggagactgggatgaggcagagagaggaggtgaggggagctgtggggggagactgggggaggtgtctggaaaaatcaggattttctgacgatgtatgacagcaaccatgcgaattcctagaactaaggacccacatcttccatgagatgctagtgtgtttagagggctgaggatgtcccaaaggcgaggtgtcttcccagatactgtggaagcattgggcagatgccacagaaagaggaatagaggtcagaggcgggggctttctgccctcaagtgccttttccccctgggcaggtatgtggaggggatcgtccacctcttctaccaragggatgacatagtgaagggggaccctgagctgcaggcctggtgtcgggagatcacggaggtggggctgtgccaggcccaggaccgaggtaagatccattctagagacagaagaagctcctgggagactctsccagggcgccttcccagccctgcccttctggggacaggaccccagcctctcatcacgcctcccttcctccctccacacgggaaagcatgtgtatcccattcccacctcctccgactcaggacaattctagagacccaagractgtcctcctcagagaccctggccatcaacccctagtcccactacaccccagtcacagatgcccctgaactgccatatcctggggccccccaggccatatccacagctgggaggggtctgcacagtccctgctgggctcatattctctcctgatggttccgttttcctaactgaggatgtaaatgggaagattttccctccgaagcccacaaggacccaccctggctttccctccctctcttcctgcctgccactgtgcagcacgcacagagggtccaggaataccgcacgcttgctacagtgcaaggtcagctcttgatgcaagctcaatcctatacatgctttgcctcaaacccaaactcagcaccctgatccttggggctcaggtttctttggctaatccaactcttccaccctaaccaccccttggccaaaatctagccactacctttagtcaactctcactccccacatttgaacctctgaggaagaaaaagcctttgctgagctcttaggtttaatcacacaggcaccagcctggactgctgtcactcatccttcggcccctccccctcacacttcagatctaggctgtgaataccatcctctgcctctgtgagacaactacagacatttactggggagcccttatggcgaatcctgggaatgtggcaaacctccttaccctggagggagcctctccctggggaatctgcaccaccctacccttccaggaccaaactctctctagttcttctcagtacagtcccttaggctcctagcagtttgggctactacaacaaaacactagctgggcacagtggctcacgcttgtaatcccagcactttgggaggctgaggtgggtggatcacgagstcaggagttcgagaccagcctggccaacatagtgaaacccgtctctactaaaaatacaaaaattagccaggcgtcgtggcacgcacctgtaatcccagctactcgggaggctgaggcaggagaatcgcttgaacttgggaggcggaggttgcagtgagctgagatcacgccattgcactccagcctgggcaacagagcgaaactccgtctcaaaaaaataaaataaaaaaaaccacacaccatagactgggtggcttataaacaacagaaatgtattcctcacagttctggaggctgaaagttcaagatcaggttctggtgagacccctcttccaggctgcccacagccgatttctccctgtatcctcacacagcagaaagatagcaagctagcactctgtcctctgctcataaaggtatcaaacccattcaggagggctgcaccctcacaccctaattatcatgtggggctccacctccaaataccatcacaataggattagatttcaatataaaaatttttcggagccaaagacattcagttcatgacacatgttaactttaacctccactaaccaccctcccccctgttctctttcagttctcatagctcacttttgtctagttttcccagcagacattttagaggctaaaattaaaaatgccatgggattagcagtcaggaacctgagttcaagatcagcctctgccttttcccaactatgcagtcctgacagtttattctctatgggctttgattttcttacctataaaatgagagtaattatatttattccacttaactgataagattattgggtctcccagcactttaggaggccaaggtgggcagatcacctgaggccaggagttccagaccagcctagccaacacggtgaaactccatctctactaaaaatacaaaaattagctgggcatggtggtgggagcctgtaatcccagctacttgggaggctgaggcaggagaatcacttgaacctgagaggcggaggttacagtgagccgagattgtgccactgcactccagcctgggcaacagagcaagactccgtctcaaaaaaaaaaaaaagattatcgggtctctgagcccccatatccactgcaaaatgagtggactgagataacctttgtgggagcccctctcagctgtgacactggaaatccatgacttattccccacattataacgcagacacttgtaattctgtcygggaataggattacgcattcctaaattatttatttattttttaatttttaaatagagacaggctcttgctctgtcacctgactaccagcaatcctcctgccttggcctcccaaagtgctgggattacaggcatgagtcaccgaccacgcatccctcaattggtttttttttttttttgagacagactctcgttgtgtcgcccaggctggagtgcagtggcgggatctcagctcgctgcaagctctgcctcccgggttcacgccattctcctgcctcagcctcccgagtacctgggactacaggtgcccgccaccacacctggctaacttttcgtatttttagtagagasggggtttcaccgtgttagccaggatggtctcgatctcctgacctcgtgatccgcccatcttggcctccccaagtgctgggactacaggcgtgagccaccgcgcccggccgcatccctcaattcttaaccactttttgaggcaagggatatttggtcactcagaacttttcagcccccaatccttccataacaataattattacttacttattgagcatttattacagaccaggtgattttgatacatcatctcatttataatgtaggtatcgtccatattttacaggtgaaaaaaactgaggttcaaataggttaagctggcctatggtaactaagtgtaagtgactgagccaggacttaaacgcatgtctgatgcaaatacgtctaaataaaataaacaaattcatcaattctaaaatatgggcatcccaaaacaacagcctttgttcctctcctcttatgctgtagcttctaactgctattcctttcctgcccaggtttccctgtctccttccagtcccagagtcaactctgccatttcctcaccatgtgcgtcttcacgtgcactgcccagcatgccgccatcaaccagggccaggtatggacagctgaaagcccaggtccctgaaggcaaggtgacctgagggagagatgggagttcaaaccctaagtaccagggttctagggttacagtttcttcctccagctggactggtatgcctgggtccctaatgctccatgcacaatgcggatgcccccacccaccaccaaggaagatgtgacgatggccacagtgatggggtcactacctgatgtccggcaggcctgtcttcaaatggccatctcatggcatytgagtcgccgccagccagacatggtgagaggggactctcgggagagggaaatgacagttggaaaggaaacatcagagtgaggggctgggctctaggtgcgtttgtctttagaaactgactgatcctttgttctgtctcaggtgcctctggggcaccacaaagaaaaatatttctcaggccccaagcccaaagctgtgctaaaccaattccgaacagatttggaaaagctrgaaaaggagattacagcccggaatgagcaacttgactggccctatgaatatctgaagcccagctgyatagagaacagtgtcaccatctgagccctagagtgactctacctgcaagatttcacatcagctttaggactgacatttctatcttgaatttcatgctttcctaaagtctctgctgctaaggctctatttcctcccccagttaaaccccctacattagtatcccactagcccaggggagcagtaaactttctctgcaaagactagatccttttttacgctttgcagaccgcatagtcactgtctcaactactcagctctcctgctgcagcatgaaggcagccacagacaacatggaaatgagtgtgactatgttccaataaaactttatggacactgagatatgaatgttacatcacaaagtagtcttcttttggtttattcaaccatttaaaatgcaaaaaaaatccacaaacaaatgtgctttgtttgagacatgcacagccaggctacagactggatttggcccttgaaccctgcactagcctgaggccctgaccctacttccaaaacatccaagatcatggagcagggggatttcttagaaaaatcagcttacctcagctaactctccattcccaggaactaaccttcatgcctggtggccaatgtacaaattcctgactcagttctttggcaaattccttccacccatatttctcctattcacccatgtaccccaaaagtccctgaataagaatcatgtttttggggcagaatacaaaccactgccccaaaatggcttctttctccaaacagtcccagatgaaaggcacataattcatgtcttaaggctacttttccagcccctttaatactctgggatctatgtgtttcccacattccaagttatctttcacaagccttttaagaacaacatgcacaaaataaatggacaagaactacaaagttattctagccaatgatagtgtttatttgttaggtcctggggtctcaaggtcaaatgatccctctcaattattctgaggtcactgtcctcactagagtgggtacaacttgctcactgcaaaactgtgttcttcaaacatccctacttcttttcttttctttttttttttttttttagaagtagtctctatcgcccaggcgggaatgcagtggcgccatctcagctcactgcaaccttcgcctcccgggttcaagggattatcccgcctcaccatcccgagtggctgggatcacaagctcatgccaccacatccagctaatttttgtaatttttagtagagacagggtttcgccatgttgacctggctggtctcgaactcccgacctcaggtgatccgcccgcctcgacattcctatttctaaataattattacagatctgtcactcaccagttaaacatacaaacggcttttttggaggggatgacctatttatatttttaaatcttatatcctaccttattcaaaagtcctatcagttttcctagtttagagaagcaaagtgacatttttgtgtacatttaacaggactgcttaccttcacaacctgctcagtcggctttccctggacttctcctaaccgcccatttttcctggatttggcaccgagagttacagtatttcacgtgcgatgataaaatgttacttaggagaaacagttccaataccaagaaacttcagcaattttaaagcattttaaagccacaaaaccatgcccgatccccaaaagggggtcctaactcctttacactgtcagaatctcaattttaaaagggaggagtagagaagagatagaaacgctctctgttggtgaaaatctgtcttacttaccatttccccaacacaggagagactaaggaatttcaggtaaaaatcagatggctccaatcctccgatactaagagcccatcgccccagttcccaggagttccgccagttagactttttcccccatggcctcgctaaggctagttcctcgtcacgtgacgtgacaggcttggtcacgtgacataccagctccttccattcccgtgtgcggggggagggggaccaacaaaccggaggccctcgctcttccaatactcacgccctagctacagaggtcaaggaaggtttccccaggagcagttttggtttcagacggcgccgtctcccgcgaaagtcctgagaggagcccagccttttccgcctgccgcccccggatgggatggttgaggccggggccacgccccctctgcccccctgcgagggcatcctgggctttctcccaccgctttccgagcccgcttgcacctcggcgatccccgactcccttctttatggcgtcgctcctgtgctgtgggccgaagctggccgcctgcggcatcgtcctcagcgcctggggagtgatcatgttggtgaggggactccccggcaaggatcggagagggcctgaggggctccgggctgggagggctgggaggcgaggaaactctgggccgcaggcaggccggaggggccggggatctacaggccccggagaaggagacagactgaaattgaaaaatgggaactgttcgagaccagcctgaccaacatggtgaaaccccgtctccaataaaaatacaaaaattagccgggcgtggtggcgcccgcctgtaatcccagctactcaggaggctgaggcaggagaatcgcttgaatccgggaggcggagggtgcagtgagccgagatcgcgccactgcactccagcctgggtgacagagcgagactccgtccccaaagaaaaagaaaaaagggaactggagcggagggccctggagtgggaggagccagggctggtaaaggtggagacccctcaaggtaggagaaacaagagcggggttcctgagaggtgcttgagttgaatggaggacatgggaggaaaagagagtgcttgttccagaaatgtgtagctgggccttgttttcccagtaatccacccaccgccacttcaagaagaaatgatatgaagaagtgccggttctccctcccctcttccgcactgtcccgtgatgatgacgcctccagagaggacgataatctgggttcctgggagagatggcttggtcactattcccacccttgcctcgaccacttgtctcaatgtcaccacctcacgccctgttccaggtggctgagtccgaatccagtaaccaccacctcgttttggttaatctcaggctcgggtgttgtagcaacattggaaatgggaggggtttacgaagtgaacatgaggtcaggtgcctgaattcaacagtctacccattccccttttccagataatgctcggaatatttttcaatgtccattccgctgtgttgattgaggacgttcccttcacggagaaagattttgagtaagtattcgggtgggggaggcgggctgggagcaggtgggaggtggcgaggcctagggtcagaattacgtctgggaggcccggtgcttagggcccctaggttagaggacttggagaggagagcggctttcttgagaatgtggttaggagccagggagtcagacctcagcggccatcccaaacccaccaccttaggtgtgacctctttaggtattttacttttctgtgcttctcagtccacctctgcaaaatggctatgacagatctcaccccataggatggtcaagaagattgaataaagtaatacacgtaacagcgcctaaacaggtgtcgggcacatagtgctcagaaaatgttggctcctattaaagtttgacccctttgcttcattcccacccccaggaatggcccccagaacatatacaacctttacgagcaagtcagctacaactgtttcatcgctgcaggcctttacctcctcctcggaggcttctctttctgccaagttcggctcaataagcgcaaggaatacatggtgcgctagggccccggcgcgtttccccgctccagcccctcctctatttaaagactccctgcaccgtgtcacccaggtcgcgtcccacccttgccggcgccctctgygggactgggtttcccgggcgagagactgaatcccttctcccatctctggcatccggcccccgtggagagggctgaggctggggggctgttccgtytctccacccttcgctgtgtcccgtatctcaataaagagaatctgctctcttcagccctgtgtctgtgcttgagtgggggcgagcacggggctgagactagaggtcggcctctgcctggaaagtcccgatctctgagcggaagtggagcgaagtgtggcgcggaagtgaggcgaaggctttccccatcgactgggcgcgccgagcggtctaagcgactgcgtctgatggggcggggagccgccgggttgagcctatccgctgcggggagggcgggacttcctgcgcgggggcccgagccgctcagtctccctgctctccgtggtcccggctcgcgtgtagcggcggcggcggcgtctccgtgaggaggcgcgcggggccatgacgtcagcgtccacaaaggttcgacctccctcgcggacagcgctccctggcggccacgggagggcgggccccccacttggctcgcggctcttccgccccgggcggggggcgggcgggagccgagcctggggtggggctaggggctccgggcgggacggggagggcgggcgccggccccccgtgacgctgccccgcccccaggtcggagagatcttctcggcggccggcgccgccttcacgaagctcggggagctgacgatgcagctgcatcccgtggccgactcttctcctgcggggtacgtgagcccggactgggacgtggacgctgagagcgggcgcttggactcggtcacagacacggaccctctctagcacagggacagacattagtttccctttgtgcstggcacagcacagagtcggtgttaataaatgatcgttgggtgagggaatgaatgacagataaaaatacagacaggcccatagcccagactcctgtttcacagttctccctgctgcgaacgggtcgaccacaaaccaccgccactcccaaccaccccagttcatggaattcccccagacggctgcaggctgtgttggtgggtctgttttgaaaagcccttcctggcgagttggtttcagtgtgctgtgtacagcagccgtttaacgttgatggtggaaaggggtgtctaaggtggaggtggttgtgatttcttgtgattggggtcctcccggttcccgcagggcctcaagagctttccgcctccccttacggaggacctctttatgcatccgtggaaggggtcccagaaatcggaaggaggcggctggttggctgtgggatgcatagcctgtgggcgggctccacaccccccctcccatttttgctatcccccctctccccttctgacagygcgaagtggacggagacggaaatagagatgctgagggctgctgtgaagcgatttggggacgatcttaatcacatcagctgtgtcatcaaggaacggacagtgtgagggagggtggctgccaraaaagggcgggtgggcmgccttcttcctccttacccaaggttccatcgtcctcagaactcctttccagctcagctgcttccctactttgtcactagttttttagaatccccttgaggactgaaagaatagaattgtcacagttggtcagaagttcctaaaatgytgtggtaatccttccaagaatgtgaatttaggttgcctgagatgctgttattgtatttgatgatggaagtcccctggttatttatataaatgtttgaggaccccactgcagtgtttccagggatatggtgaccctgaactagttgatcagtaaatctcaatccacctgtaaatcaccaagctctacctgatgtctctcccagaagagaattaggagatgggcctttcccactactcagttcagggactccactctccacactccatccatcctgagtgagtgtaaaacttcgagaaagtgagaaccctaccaatgggttggggccccgacctggattcttatgaagggactcccagaaccccttcccctcccgtcccctcttctgttagtctctctgatgactcctttcctaacctcttctctcttttcttcagggcccagataaaggccactgtgaaacgcaaggtatatgaagattctggcatcccccttccagctgagtcacccaagaaagggcccaagaaggtggcatctggtgtcttgtcacctcctccagctgcccctcctcccagcagctccagtgtccctgaggccgggggtccccccataaagaaacagaaggctggtgagggctgtggagttgctgcctaggggttaaaggtcccatctgaggtttagtgagy

SEQ ID NO: 95579 - DNA, 19848 bp, Homo sapiens
  misc_feature (1)...(19848): n = A,T,C or G
nnnnnnnnnnnnnnnnnnnnnnnnnnnnnnnnnnnnnnnnnnnnnnnnnnnnnnnnnnnnnnnnnnnnnnnnnnnnnnnnnnnnnnnnnnnnnnnnnnnnnnnnnnnnnnnnnnnnnnnnnnnnnnnnnnnnnnnnnnnnnnnnnnnnnnnnnnnnnnnnnnnnnnnnnnnnnnnnnnnnnnnnnnnnnnnnnnnnnnnnnnnnnnnnnnnnnnnnnnnnnnnnnnnnnnnnnnnnnnnnnnnnnnnnnnnnnnnnnnnnnnnnnnnnnnnnnnnnnnnnnnnnnnnnnnnnnnnnnnnnnnnnnnnnnnnnnnnnnnnnnnnnnnnnnnnnnnnnnnnnnnnnnnnnnnnnnnnnnnnnnnnnnnnnnnnnnnnnnnnnnnnnnnnnnnnnnnnnnnnnnnnnnnnnnnnnnnnnnnnnnnnnnnnnnnnnnnnnnnnnnnnnnnnnnnnnnnnnnnnnnnnnnnnnnnnnnnnnnnnnnnnnnnnnnnnnnnnnnnnnnnnnnnnnnnnnnnnnnnnnnnnnnnnnnnnnnnnnnnnnnnnnnnnnnnnnnnnnnnnnnnnnnnnnnnnnnnnnnnnnnnnnnnnnnnnnnnnnnnnnnnnnnnnnnnnnnnnnnnnnnnnnnnnnnnnnnnnnnnnnnnnnnnnnnnnnnnnnnnnnnnnnnnnnnnnnnnnnnnnnnnnnnnnnnnnnnnnnnnnnnnnnnnnnnnnnnnnnnnnnnnnnnnnnnnnnnnnnnnnnnnnnnnnnnnnnnnnnnnnnnnnnnnnnnnnnnnnnnnnnnnnnnnnnnnnnnnnnnnnnnnnnnnnnnnnnnnnnnnnnnnnnnnnnnnnnnnnnnnnnnnnnnnnnnnnnnnnnnnnnnnnnnnnnnnnnnnnnnnnnnnnnnnnnnnnnnnnnnnnnnnnnnnnnnnnnnnnnnnnnnnnnnnnnnnnnnnnnnnnnnnnnnnnnnnnnnnnnnnnnnnnnnnnnnnnnnnnnnnnnnnnnnnnnnnnnnnnnnnnnnnnnnnnnnnnnnnnnnnnnnnnnnnnnnnnnnnnnnnnnnnnnnnnnnnnnnnnnnnnnnnnnnnnnnnnnnnnnnnnnnnnnnnnnnnnnnnnnnnnnnnnnnnnnnnnnnnnnnnnnnnnnnnnnnnnnnnnnnnnnnnnnnnnnnnnnnnnnnnnnnnnnnnnnnnnnnnnnnnnnnnnnnnnnnnnnnnnnnnnnnnnnnnnnnnnnnnnnnnnnnnnnnnnnnnnnnnnnnnnnnnnnnnnnnnnnnnnnnnnnnnnnnnnnnnnnnnnnnnnnnnnnnnnnnnnnnnnnnnnnnnnnnnnnnnnnnnnnnnnnnnnnnnnnnnnnnnnnnnnnnnnnnnnnnnnnnnnnnnnnnnnnnnnnnnnnnnnnnnnnnnnnnnnnnnnnnnnnnnnnnnnnnnnnnnnnnnnnnnnnnnnnnnnnnnnnnnnnnnnnnnnnnnnnnnnnnnnnnnnnnnnnnnnnnnnnnnnnnnnnnnnnnnnnnnnnnnnnnnnnnnnnnnnnnnnnnnnnnnnnnnnnnnnnnnnnnnnnnnnnnnnnnnnnnnnnnnnnnnnnnnnnnnnnnnnnnnnnnnnnnnnnnnnnnnnnnnnnnnnnnnnnnnnnnnnnnnnnnnnnnnnnnnnnnnnnnnnnnnnnnnnnnnnnnnnnnnnnnnnnnnnnnnnnnnnnnnnnnnnnnnnnnnnnnnnnnnnnnnnnnnnnnnnnnnnnnnnnnnnnnnnnnnnnnnnnnnnnnnnnnnnnnnnnnnnnnnnnnnnnnnnnnnnnnnnnnnnnnnnnnnnnnnnnnnnnnnnnnnnnnnnnnnnnnnnnnnnnnnnnnnnnnnnnnnnnnnnnnnnnnnnnnnnnnnnnnnnnnnnnnnnnnnnnnnnnnnnnnnnnnnnnnnnnnnnnnnnnnnnnnnnnnnnnnnnnnnnnnnnnnnnnnnnnnnnnnnnnnnnnnnnnnnnnnnnnnnnnnnnnnnnnnnnnnnnnnnnnnnnnnnnnnnnnnnnnnnnnnnnnnnnnnnnnnnnnnnnnnnnnnnnnnnnnnnnnnnnnnnnnnnnnnnnnnnnnnnnnnnnnnnnnnnnnnnnnnnnnnnnnnnnnnnnnnnnnnnnnnnnnnnnnnnnnnnnnnnnnnnnnnnnnnnnnnnnnnnnnnnnnnnnnnnnnnnnnnnnnnnnnnnnnnnnnnnnnnnnnnnnnnnnnnnnnnnnnnnnnnnnnnnnnnnnnnnnnnnnnnnnnnnnnnnnnnnnnnnnnnnnnnnnnnnnnnnnnnnnnnnnnnnnnnnnnnnnnnnnnnnnnnnnnnnnnnnnnnnnnnnnnnnnnnnnnnnnnnnnnnnnnnnnnnnnnnnnnnnnnnnnnnnnnnnnnnnnnnnnnnnnnnnnnnnnnnnnnnnnnnnnnnnnnnnnnnnnnnnnnnnnnnnnnnnnnnnnnnnnnnnnnnnnnnnnnnnnnnnnnnnnnnnnnnnnnnnnnnnnnnnnnnnnnnnnnnnnnnnnnnnnnnnnnnnnnnnnnnnnnnnnnnnnnnnnnnnnnnnnnnnnnnnnnnnnnnnnnnnnnnnnnnnnnnnnnnnnnnnnnnnnnnnnnnnnnnnnnnnnnnnnnnnnnnnnnnnnnnnnnnnnnnnnnnnnnnnnnnnnnnnnnnnnnnnnnnnnnnnnnnnnnnnnnnnnnnnnnnnnnnnnnnnnnnnnnnnnnnnnnnnnnnnnnnnnnnnnnnnnnnnnnnnnnnnnnnnnnnnnnnnnnnnnnnnnnnnnnnnnnnnnnnnnnnnnnnnnnnnnnnnnnnnnnnnnnnnnnnnnnnnnnnnnnnnnnnnnnnnnnnnnnnnnnnnnnnnnnnnnnnnnnnnnnnnnnnnnnnnnnnnnnnnnnnnnnnnnnnnnnnnnnnnnnnnnnnnnnnnnnnnnnnnnnnnnnnnnnnnnnnnnnnnnnnnnnnnnnnnnnnnnnnnnnnnnnnnnnnnnnnnnnnnnnnnnnnnnnnnnnnnnnnnnnnnnnnnnnnnnnnnnnnnnnnnnnnnnnnnnnnnnnnnnnnnnnnnnnnnnnnnnnnnnnnnnnnnnnnnnnnnnnnnnnnnnnnnnnnnnnnnnnnnnnnnnnnnnnnnnnnnnnnnnnnnnnnnnnnnnnnnnnnnnnnnnnnnnnnnnnnnnnnnnnnnnnnnnnnnnnnnnnnnnnnnnnnnnnnnnnnnnnnnnnnnnnnnnnnnnnnnnnnnnnnnnnnnnnnnnnnnnnnnnnnnnnnnnnnnnnnnnnnnnnnnnnnnnnnnnnnnnnnnnnnnnnnnnnnnnnnnnnnnnnnnnnnnnnnnnnnnnnnnnnnnnnnnnnnnnnnnnnnnnnnnnnnnnnnnnnnnnnnnnnnnnnnnnnnnnnnnnnnnnnnnnnnnnnnnnnnnnnnnnnnnnnnnnnnnnnnnnnnnnnnnnnnnnnnnnnnnnnnnnnnnnnnnnnnnnnnnnnnnnnnnnnnnnnnnnnnnnnnnnnnnnnnnnnnnnnnnnnnnnnnnnnnnnnnnnnnnnnnnnnnnnnnnnnnnnnnnnnnnnnnnnnnnnnnnnnnnnnnnnnnnnnnnnnnnnnnnnnnnnnnnnnnnnnnnnnnnnnnnnnnnnnnnnnnnnnnnnnnnnnnnnnnnnnnnnnnnnnnnnnnnnnnnnnnnnnnnnnnnnnnnnnnnnnnnnnnnnnnnnnnnnnnnnnnnnnnnnnnnnnnnnnnnnnnnnnnnnnnnnnnnnnnnnnnnnnnnnnnnnnnnnnnnnnnnnnnnnnnnnnnnnnnnnnnnnnnnnnnnnnnnnnnnnnnnnnnnnnnnnnnnnnnnnnnnnnnnnnnnnnnnnnnnnnnnnnnnnnnnnnnnnnnnnnnnnnnnnnnnnnnnnnnnnnnnnnnnnnnnnnnnnnnnnnnnnnnnnnnnnnnnnnnnnnnnnnnnnnnnnnnnnnnnnnnnnnnnnnnnnnnnnnnnnnnnnnnnnnnnnnnnnnnnnnnnnnnnnnnnnnnnnnnnnnnnnnnnnnnnnnnnnnnnnnnnnnnnnnnnnnnnnnnnnnnnnnnnnnnnnnnnnnnnnnnnnnnnnnnnnnnnnnnnnnnnnnnnnnnnnnnnnnnnnnnnnnnnnnnnnnnnnnnnnnnnnnnnnnnnnnnnnnnnnnnnnnnnnnnnnnnnnnnnnnnnnnnnnnnnnnnnnnnnnnnnnnnnnnnnnnnnnnnnnnnnnnnnnnnnnnnnnnnnnnnnnnnnnnnnnnnnnnnnnnnnnnnnnnnnnnnnnnnnnnnnnnnnnnnnnnnnnnnnnnnnnnnnnnnnnnnnnnnnnnnnnnnnnnnnnnnnnnnnnnnnnnnnnnnnnnnnnnnnnnnnnnnnnnnnnnnnnnnnnnnnnnnnnnnnnnnnnnnnnnnnnnnnnnnnnnnnnnnnnnnnnnnnnnnnnnnnnnnnnnnnnnnnnnnnnnnnnnnnnnnnnnnnnnnnnnnnnnnnnnnnnnnnnnnnnnnnnnnnnnnnnnnnnnnnnnnnnnnnnnnnnnnnnnnnnnnnnnnnnnnnnnnnnnnnnnnnnnnnnnnnnnnnnnnnnnnnnnnnnnnnnnnnnnnnnnnnnnnnnnnnnnnnnnnnnnnnnnnnnnnnnnnnnnnnnnnnnnnnnnnnnnnnnnnnnnnnnnnnnnnnnnnnnnnnnnnnnnnnnnnnnnnnnnnnnnnnnnnnnnnnnnnnnnnnnnnnnnnnnnnnnnnnnnnnnnnnnnnnnnnnnnnnnnnnnnnnnnnnnnnnnnnnnnnnnnnnnnnnnnnnnnnnnnnnnnnnnnnnnnnnnnnnnnnnnnnnnnnnnnnnnnnnnnnnnnnnnnnnnnnnnnnnnnnnnnnnnnnnnnnnnnnnnnnnnnnnnnnnnnnnnnnnnnnnnnnnnnnnnnnnnnnnnnnnnnnnnnnnnnnnnnnnnnnnnnnnnnnnnnnnnnnnnnnnnnnnnnnnnnnnnnnnnnnnnnnnnnnnnnnnnnnnnnnnnnnnnnnnnnnnnnnnnnnnnnnnnnnnnnnnnnnnnnnnnnnnnnnnnnnnnnnnnnnnnnnnnnnnnnnnnnnnnnnnnnnnnnnnnnnnnnnnnnnnnnnnnnnnnnnnnnnnnnnnnnnnnnnnnnnnnnnnnnnnnnnnnnnnnnnnnnnnnnnnnnnnnnnnnnnnnnnnnnnnnnnnnnnnnnnnnnnnnnnnnnnnnnnnnnnnnnnnnnnnnnnnnnnnnnnnnnnnnnnnnnnnnnnnnnnnnnnnnnnnnnnnnnnnnnnnnnnnnnnnnnnnnnnnnnnnnnnnnnnnnnnnnnnnnnnnnnnnnnnnnnnnnnnnnnnnnnnnnnnnnnnnnnnnnnnnnnnnnnnnnnnnnnnnnnnnnnnnnnnnnnnnnnnnnnnnnnnnnnnnnnnnnnnnnnnnnnnnnnnnnnnnnnnnnnnnnnnnnnnnnnnnnnnnnnnnnnnnnnnnnnnnnnnnnnnnnnnnnnnnnnnnnnnnnnnnnnnnnnnnnnnnnnnnnnnnnnnnnnnnnnnnnnnnnnnnnnnnnnnnnnnnnnnnnnnnnnnnnnnnnnnnnnnnnnnnnnnnnnnnnnnnnnnnnnnnnnnnnnnnnnnnnnnnnnnnnnnnnnnnnnnnnnnnnnnnnnnnnnnnnnnnnnnnnnnnnnnnnnnnnnnnnnnnnnnnnnnnnnnnnnnnnnnnnnnnnnnnnnnnnnnnnnnnnnnnnnnnnnnnnnnnnnnnnnnnnnnnnnnnnnnnnnnnnnnnnnnnnnnnnnnnnnnnnnnnnnnnnnnnnnnnnnnnnnnnnnnnnnnnnnnnnnnnnnnnnnnnnnnnnnnnnnnnnnnnnnnnnnnnnnnnnnnnnnnnnnnnnnnnnnnnnnnnnnnnnnnnnnnnnnnnnnnnnnnnnnnnnnnnnnnnnnnnnnnnnnnnnnnnnnnnnnnnnnnnnnnnnnnnnnnnnnnnnnnnnnnnnnnnnnnnnnnnnnnnnnnnnnnnnnnnnnnnnnnnnnnnnnnnnnnnnnnnnnnnnnnnnnnnnnnnnnnnnnnnnnnnnnnnnnnnnnnnnnnnnnnnnnnnnnnnnnnnnnnnnnnnntttcttaatggcgccaacccccgtggtgctgaggcgctctgctcaccttccctgctcgcctagtgttccctccaggcatggaggaactgcaggcccagctggagaaggagctggaggtatggacatcagagccctgaggaagctcagcagtgaagtggggtggcctagtgccaatgatgctgctgcgggacccactgtgggcctggcttgctgccagccagcaaggacggattctgcaggagaggtcctgagggaccctggagaagctcagctgctcggcctccttcctacacgagagtagctgcggagggagggcgtgcaaggtggaatggttgatagaaacaaggtcaaatgaagaaatgtgactggcccctggtgctagggattcggggagtgtgcagagtaagagagtcaggatcagagtgctgtggctgttcatcaggaggcgatatggaacaacagagaggaaattcatgggattaagggcagataggcttggatgtgaatcctggttctgctatttgtaagctgtgtgacctcaggcaaaatacccaacctctctgattatctgtttcctcttctgtaaaattgaggctcattcaactaggtataaaaattataaggctgrgcacagtgactcacacctgtaatcccagcactttgggaggctgcaggaggatcacctgagcccaggagttggagaccagcctaggcaacgtggtgaaaccctgtctctacaaaagtacaaaaattatcacctgtaatctttggtgtagtggcatgcacctgtagtcccagctacttgggaggctgaggtgggaggatcacctgggcccaaggamgtcaaggctgcagtgagccgtggtgatcctgccacgcactccagcctgggcagcacggtaagaccctgattaaaaaaaaaaatgatatgaggaagtaagcacatgatccattacctggtataaagtagatgatggagacgagttagctccactctcttcccccttggaggaatccgagtaggaagaagatgctttatgttgatagcagcccttgacctcttcccccacccagggaggcacactgttcgaagctgacttctccctgctggatgggatcaaggccaacgtcattctctgtagccagcagcacctggctgcccctctagtcatgctgaaattgcagcctgatgggaaactcttgcccatggtcatccaggtgagaggactcaggatttctgctcccagtctctggcttttgagaaagctcagccccttatcaaaatttactgagcaccatctgcaaaggcactgggctaaggcacctgggagacgcgaaaggaggaaatgcrccaagtctctattcgaaggccttgcagtgtagctggagagacagactgggccagtctgcagaagctccaggactgaggaagtccctgaggacagagacagcccaggagggattggggaggtggggtgtcacgagctttggaggagggccaggtctcagacaagcaggagggagaggaaggaccggtcctcaggggcaagacagactgggcagaggctgaggtagaggagtcaggcaattcctaggggacagwwggaccagaagccagactaagccaggctaaggagtatgaggtgggaagctggagaaggccgtgatgaaaygtgctgtgggcacgcggtgtgggcagtggtgtttagggtgggttggagaggggagatgctagaaatagggactggggcaacatgccccagcactgaccccaggaggaggggagctcggatgtgggtagtgaccatcaggatggagaggacaggtggatgcgagtgcagagggagatcaaggagaggggaaaggggagccaggccagttgcctssagaaatagcaccgataaagagaacagggtgcccaggtggatttttgtctggccaatgttgaggtaacgggaagacacttaaattatccagcaggcagctgagaacaagagattcagtcatttgtgtagaggtggggccaaaagatgagttttcaaaaaacagtgtgggatggaggaagcaggtggtttgaatcttgtccacactgtgggaactgaaaggggaagtggaggctggaggaggcaccagaagagcagtttctgcagaaykctggaggcaaagcagcttgcagggtgctaatgcactgagcgggcaggaaggggaggggaggaaacgggagccgtagggagcrgcaggagtgagatggggaaassagaacaggtttrgaggacgaagggtgaggttaacatscaaggggggcgggaatcgctgagtgcctggcactcatgccttctctcccsacacttgtccctgctccagctccagctgccccgcacaggatccccaccacctccccttttcttgcctacggatcccccaatggcctggcttctggccaaatgctgggtgcgmagctctgacttccagctccatgagctgcagtctcatcttctgaggggacacttgatggctgaggtcattgttgtggccaccatgaggtgcctgccgtcgatacatcctatcttcaaggtaactccttatccccttctctcttgcctgccactatctctgccccagggcwcgttccgacctctggaggctccctctctgtggggtctcggggtacagagagaaacaatgaatggacaatgtgagagcarcagagaatgagcagggctggccatgcattttcaaaggggatagcacctcccacctgggaaagtggcgaaaataatcttactctttttatatgtaaagcacagtacatgcaaatgaccaaggattccatccaacaagaggaacccgwgaaataacgttaaaaagatcttttccagacattgattttttttttttttttgagatggagtctccctttgcccagactggagtgcagtgatgcgatctcggctcactgcaacctctgcctcctgggtttaagcaattctcccacttcagcctccccagtagctgggattacagtcgcgcaccaccaggcctggctaattttttttgtatttttaatagaaacaggatttcaccatgttggccaggctggtctcgaatgcctgacctcagatgatctgcttgtctaggtctcccaaagtgctgggattacaggcgtgagtcactgtgcctggtccaagtttgtcttctttaaagaactgaaagaagcctagtgtaatggatgaaggagagagggaggagaccaggctctggagggaggcagtggttagaacatccattctcagtgggggcacaatgtcccccaagggatgaagatggttggaaaatgtgtgtgaaaaatattattattattattattattattattgctgcccaggctggagtgcagtgtcacgatcttggctcactgcaacctctgcctcctgggttcaagcaattctcctgcttcagcctcccgagtagctgggattcaggtgcctgccaccatgcctggctaatttttgtatttttagtagagatgaggttttgccatgttggtcaggctggtctgaaactcctgacctcaggtgatccgcccacctcggcctcccaaagtgttgggattacaggcgtgagccaccgtggccggccaaatcttattactttatatagcacagatataatgtgatatatatctatataaagcacagatataatgcaatacatagacagatatacagtatatatgtagcattaatatttaatgaggtggagtgagattaggaaaaaacatctcaaaagggtacttagtgggtgattaaaaaaaaaaaagttgagaaatcttggtctagacctatgaaaaaatatgaaaagaaaaggaggccaggcacggtggttcacgcctgtaatcccagctactcgggaggctgaggcaggagaatcgcgtgaacccagaagacggaggttgcagtgagccgagatcacaccactgtacttcagcctgggaaacagagcaagactccatctcaaaacaaaacaacaacaacaaagaatgatttctttcaattatcataaagcactaagtctggtttgtggaatggaaatagttgatgcaaatcaactgaaagctcagtggttttatttttatgtatttatttttaactttaattttaggttcaaggatacatgggcaggtttgttctgtaagtaaattgtgtgtcatggggcttggtgtacagattattttgtcaccaggtaataagcatggtaccccataggtagtttttggatcccctcactccttccaccctctgtccacaagtagatgctggtgtctgttgttcccttatttgtgtccatgtgtactcaatgtttagctctcacttataagtragaacataccatatttggctttctgttcctgtgttagtccacttaggattatggcctccagctccatccatgttgctgcagagaacatgatcttgttcttcttcatggctgcatagtattccacagcatatgtctaccacattttctttacctggtctattgttgatgggcatttaggttgattmyatatctttgctattgtgagtagtgctggatgaacatccgtgagcatgtgtgtttatagtaaggcgatttatattttgggaggtatatatccagtaatgggattgctgggttgaatggtacttctgaaaactcactgttgagaggccactgaactttacgtctgtgctttttctgaagacctggtgcctttcctgctgtcagcccttgtttcctgcagggatcttgcagctctyctctgactctgcccttccctgtgtttctccctctagcttataattccccacctgcgatacaccctggaaattaacgtccgggccaggactgggctggtctctgacatgggaattttcgaccaggtatgggaagagaaagggagattctgggtctrtcttttttccagctctggattcagggcaggtcgattcgcctgaccctgctcaccctcacttctcagataatgagcactggtgggggaggccacgtgcagctgctcaagcaagctggagccttcctaacctacagctccttctgtccccctgatgacttggccgaccgggggctcctgggagtgaagtcttccttctatgcccaagatgcgctgcggctctgggaaatcatctatcggtgaggcargcgggaaggccagtgggggtgcaagtgggggtggagaagacatgtaggagagcaggaggtctgcgtctggwwgggggcctggggccctgacctggccatgtgagcaggggcagagctggcttcagctccctggccctgctccgttggttggtaggtatgtggaaggaatcgtgagtctccactataagacrgacgtggctgtgaaagacgacccagagctgcagacctggtgtcgagagatcactgaaatcgggctgcaaggggcccaggaccgaggtaagaggagcccctgccctgagatctcagacacaaagcccaagagatcttcccagaatcccctgtgcttctgtgaaatctcccagaagcattttcaacacctatgagaactccagaggccttctcagattccactccctgtcacctagagacaggtccccgtcctacacactgagaacctctaggtgccagatgcagcgggaccagtggctgctcataaatgtttaacaactgactctcgggaagaaccgtcctgatttgtagcttttgcacatttccatggtataaatatttttactgtgactaccaaggtgatgctgaccagcttgctaaacacctaacgtcatggactgactcttgcgagccagtgtgagtcagcagcagcacmccactgagtgggaccctcccggcagagctccccactcccccaccccaacctgctgtcatggtaattcctgtaagagttaactgagcattcctgccgctctttctcgcccttgttctcctctcttggcctcttcctctgagcgctgccctactcctgccttcgcagcttctaactctcttcaccccttgcagggtttcctgtctctttacaggctcgggaccaggtttgccactttgtcaccatgtgtatcttcacctgcaccggccaacacgcctctgtgcacctgggccaggtacttaccagagatgggcagctgggaatttggggcctggagtgagggaggggtctgtgtgcrggtggaccacggggcwcgcgtgcttggyaggcactgactckgkatccctgcccttccttagctggactggtactcttgggtgcctaatgcaccctgcacgatgcggctgcccccgccaaccaccaaggatgcaacgctggagacagtgatggcgacactgcccaacttccaccaggcttctctccagatgtccatcacttggcagctgggcagacgccagcccgttatggtgagagctgagtgcccagggccctaaggaaggaggcagctgtggggacgtgtggcatcccagactgggggtcataaggctctcagccaccttttcctctccctcccaggtggctgtgggccagcatgaggaggagtatttttcgggccctgagcctaaggctgtgctgaagaagttcagggaggagctggctgccctggataaggaaattgagatccggaatgcaaagctggacatgccctacgagtacctgcggcccagcgtggtggaaaacagtgtggccatctaagcgtcgccaccctttggttatttcagcccccatcacccaagccacaagctgaccccttcgyggttatagccctgccctcccaagtcccaccctcttcccatgtcccaccctccctagaggggcaccttttcatggtctctgcacccagtgaacacattttactctagaggcatcacctgggaccttactcctctttccttccttcctcctttcctatcttccttsctctctctcttcctctttcttcattcagatctatatggcaaatagccacaattatataaatcatttcaagactagaatagggggatataatacatattactccacaccttttatgaatcaaatatgatttttttgttgttgttaagacagagtctcactttgacacccaggctggagtgcagtggtgccatcaccacggctcactgcagcctcagcgtcctgggctcaaatgatcctcccacctcagcctcctgagtagctgggactacaggctcatgccatcatgcccagctaatatttttttattttcgtggagacggggcctcactatgttgcctaggctggaaataggattttgaacccaaattgagtttaacaataataaaaagttgttttacgctaaagatggaaaagaactaggactgaactattttaaataaaatattggcaaaagaatatagagcatcaaaaaatttttctgggttcatatgcttgatgtggtaaagaattaaaaattttttatttttattgagacagaatcttgctcttgctgcccaggctggagtgcaatggcgcgatcttggctcgctgcaaccttcgcctcccaggttcaaacaattctcctgcctcagccgcccaagtagctgggattacaggcgcctgccaccacgcccaactaatattttgtatttttagtagagatggggtttcgccatgttggccaggctggtttcgaactcctgacctcaggtgatccacccgcctcggcctcccaaagtgctgggattacaggtgtgagccgccctgcccggcctaaaaatttttaaaaattaaaaaaaaattgtcttctaactggataggatttaatttgtgtcctgaaaccagacacactacaaaggaaaccattaacatagtgagtcctaagaatgtttgactttgaagattttcatttcaaggctcaagcagaaaatatgaaacaaaagtcagctggttgaactgaagaagctgctcctggctggagatacgtggccttaggacttcagcctgaggcatccgtgtcttaacccatctgccgttcaccagttggcaagctgcaagttaatataattaactggaagaagactaaacatttcattattatcataatgagtacaacaacggattcaatgaacttcaacttctgtatcatgttacaatttggggaaaataaacttggaaattttctttcttttttttttttttttttttgagacggagtcttgctctgccacccaggctggagtgcagtggtgcgatctcagctcactgcaacctccgtctcctgggttcaagcaattctcctgcctcagcctcccaagtagctgggattacaggtgcccaccaccatgcccggctaatttttttgtatttttagtagagacaagggttcactgtgttggccaagttggtctcgaacttctgacctcaggtgatccacccgccttggcctcccaaagtactgggattacaggcatgagccaccgcacccggcctttatttcttaatgtgatcatctgtgagtattttaaaacaaactaacggtatacacaaaacaaaagtgtttcatttataatgtgaataaagttgcttcttgcctctgattctgtttaattctacagaagacatactggcaatgtttggtctgatttttcttttaagacggagtctcactttgttgcccaggctgtagtrcagtggcgcaatcttggctcactgatacctctgcttcccgggttctcctgcctcagcctcccgtgtagctgggattacaggtgcccgccaccacacccagctaattttttgtatttttggtagagatgggatttcatgttggccaggctggttttgaactctcaacctcaggtgacccgcctgcctcggcctcccaaagtgctgggattccaggtgtgagccaccgtgcctggcctatatcagttctcatcccatgaaatagttccccttaatcacagactaaaaaactatatattttttcacttctattgaagtcttagatggatttcctgatagagaatgtaaaatttacactcaatgatcatcacagaaataaaatcattacaatcttttaaaatccttttattcaccttgaaagcaattttggatttcagactttaaaaataatatttcctggctgggggcagtggctcacgcctgtaatcccagcactttgggagaccaaggcgggcggatcacctgaggccgggagttcaagaccagcctgaccaacgtggagaaaccccatctctactaaaaatacaaaattaggcgggcatggtggtgcatgcctgtaatcccagctactcgggaggctgaggcagaattgcttgaactcgagaggtggaggttgtggtgagctgagatcgtgccattgcactccagcctgggtaacaagagagaccctccatctcaaaaaaaatatatatatatctatatatctatatattatgttcactgaaggttgctttaaggacggtgctaggccaacactgagaagagtatctgtaacaaaataggcattcagtaatctttttttaagttaatgagcaaaaaaattaaaaatatatgtttcaactggatcatatttcccaatgcaaataccaggggcttccatgaaaaacttttgagggctttttttttttttcttgaagggcaattttttttcatataaagtttgtattgaacaaacttttacaaagaacgatttcgcactatggcagagtatgtctgcacatcgcatttgtatttgctctttatgatgaaattatcaaacacattaataagatctgaaggtctagtttccaagaaaggaagatggtcatggatgctggtgtaagccaggccttctacaaaaatttgaacaactgcctgatcccttgagttgtgaaaggtattttaaaattagtattgcatagtaaaaattatgttaattattgttgttttcagtgttaattatgggcttactaattgcataaataatgacttccttaatgttttatttcaaagtagagtttaggatgctaaacatatgtttattgtttgcaaatatctatgtgctggcatttatgtgagccaagcagtctgattgggccaaaccctgggaaatgtaaatatatttattcttattttactatttggcacagcctgttgtctcccaataactgtaataatgtctgctattgaatcgtggcagacaccatccagtgtttctcggaatacaggcagccctcctacactctgcatcagagcccctcccgcaggggatgcttgttaaaggatggattcgcaggacccgccgctgaatcagaacttaagtttaaaaaaggctgcaccttcacgggtgctcgctctgtcctaccagtgagcttccctttagtttcgcgtttccacaggaaacaggacatagatctaaaattgcctttgcacttggactggtttcctttgctgacctaatacagaatagctttttgtgctgtgactgcgagtgtgttgaacagatcctctgtattttaggagaagaaatttggtgcctcgttgctcaccatcaccactggccctggtagctctgcggataaaccagcttggatttcacccttgaggattaacattgcaacactgcataggcacataaagccacctgaaagtcaagatgaggcaggtaatgtgcgcactgggatctcgtgtggttggtgtcttgtcttttgccatttgtcgggtacagcagctgcagttgctgaagcaggtgagtaactttcaagagccgaaccaactgcaagaagctctcctggaaaggggcatgaaggctgctgaccctcctcctgcccctccgccgaccaactccacacctgggattagaggggaggaaacctttatcccatattctcttatgttctattgctggggacctgcaaattaaactgacagaacacagattaacaagagaaaaaggatacaaattttacggatgttaatgttttatgggtacaggagcttcacaaaaagaagtagaaaactccaataagtgtttagacttgagaaattatatactatttgagcaaagggtgataggttatagagaagtgactgaataaagaaaagaatgtttgggcttccggggtaataaactgtaagaaagtgtttaggaatatatgggagaaattaatggacgagaacagttatctctcttccatttgtttgtttatgtagactcttctcaatgcaactcctgtcactggtgataagagtcactctctttcttctgggtacagaggggcatcttcctcaaagcaaaatttaggtcctgcatttaggcagataagggaggacagagaacttttactgcatctgttgtttcttcattgtctatagctcaaattattcttttgccgaggtagcatattttgggggtggcatgttgtgatcctctttaggatcatcagcacctccagctagggtgaggctggacaggagctggcacaaaggaggctttcaggcagtttccttgagttctaaccgcaacccctgcagaacaattggcctgtggcctgctgtccccactatgcctgaattgctgtggactaatttatgagtagccctctgaacccagaggaagctcgaggagcagaattgacatacccatcagctagaatcgctgtaggaagacagaatcagtgaacataaagtatccaagttcgaacaactgaaaatgaaatcataattaatttttaaaagagttttgtgaaatatgtggataaagcatactttccgatgagcctaatactatgaatgataaattataaatgggagtcctatttcaaatctaagcaaggatggctgggcgcagtgactcatgcctgtaatcccagcactttgggatgccgaggcgggtggatcacttgaggctagcagttcaagaccagcctggtcaacatggtgaaaccccatctctactaaaaatacataaattagctgggcatggtggcaggtgcctgtaatcccagctactcaggaggctgaggcaggagaatcacttgaacccgggaggtggaggttgcagtgagctgagatcgtgccactgcactccagcctgggtgacagagtgagactccatctcaaaaagaaaaaaaaaaaaaatccaagcggacttagactcacagaaatcattatgttccacgagagggcagtatagtaactcgtttataaaacagtaggctcggaagagcagaggaaaacatttgtgaacagttttaaaatttgtgatgagcaccgggcgcggtggctcacacctgtaatctcagcaccctgggaggccgaggcgggaggatcacctgaggttgggagtttgagaccagcctgaccaacgtggtgaaacaccgtctctgctaaaaatacaaaaaaattagccgggcttggtggcgcatgcctgtaatcccagctactggggagactgaggcaggagaattgcttgaaccccagaggcggaggttgcagtgagcggagatcgcgccactgcactccagcctgggcaacaagagcaatactccgtctcaaaaaacaaacaaacaaacaaacaaacaaaagattgtgatgagaacctgtttgagcagaaacaaaatcaaatcgcatttttaccataaagtgtttgtctctatgacatgatgactactcaggaagattggttttttcaagtaggaatgacatacttttgaaaaagtaagttgcttgacttggaattaaatggaattgctttcgttcgttgctatgttgctcggttgctaygtggtctagtagaagctacaaacaaaatccaggagatcacatttcctctgcctcagcccctggaaaagctttatatgcctgagtcctcacctccagttgtgcctggagctacgaagtttgcgggagagtttaaattgggaaagatagtaatccttacagccagctttatctgaactctgagtaccaggctgggcgctttacatggattatttctttcagccccatgatagctctatgagttaggaactattattatcttcattaaaccaaggcccatagaggactgagtgtttgcccgtgggacacgcacggctcatcgatggcagatgcaaagtcgggattcaaaccgggcagatcaaatctagatcccaagtttgagctatttctaggcaattggtggcaaagacagaactagaacccatatctctttgttacaaattaaagagtgactttaatattgaaaacgatgtgtatggcgggactgggtagaagaaacctttggaagacggctgatgggacagacgcaaagtgactgtgtttgcaaaaagacaggttcatgccaagaaacgagaacattccaggctgagctgggatgccccatttatgccaattatgcagtgtcagagtggccaagaccagagggatttccccattgccttctcaaactccaaagagctctgagatccacaagctggtggggttcccaggagaagcctgcagaaggtgcttcctcctccaggccacagaagaggacagagagaagttcccctaaatccccagagcccttagtcaagttcatcccaaaactatccgaataatcatcactgctatcccttgagaattcaaatgccaggccctgtgctaagcattttacttgtgttagctcatttagtcctcatagcaattcagtgaggtggggcttatgttcactatctgggaatttcacaggctggcccctctcacaggagtttcatcatgtaaggcctgcgtacatatatgcatgagaaagcatgtcttgcacacgaattggttttcctaaaccctccctcatctttg

SEQ ID NO: 95580 - DNA, 219542 bp, Homo sapiens
ctatgtggcataaaataatactttttacaagcgactttattctaaaccctgtggtcatacagatatcaccaagtccatcgaagaactaatgaagggaattttcatttaacttcttaaaaaagacaatttatccaaattactaaaaagtggcatataaagataaatgtgggatacattagggaaaaaagtagtgtttaaatgttaaacctttcaggcatttggagcaaggggaaaagggggtggagagacagattaaatatgttttgaagggacacaaaatccatcaaaattggggatttgtgaccttttttggggtcagcaatccctttaagaatctgatcaaagctatggaccctttttccctcaaacatgcacttatgtgacatatatgttacatacatatgctttatatatgtattgatgtgtgtgtgtatatatatatgtaaaacattttaatacaatttcaagagtaccacagatttctttaagaccaatctgtggatcctcaaagacctcaggttaggaatacctgctttgacttggactccatttcaaagtttttttttaatttaaaaacttttttgttttgttttttttgagacaggggcttgctgtgttgcccaggctggagtgcagtggtatgatcgtagctcactgcagccaggagggatcctcccgtctcagcctcctgagtagctaggactacaggcacatgccaccatgctgggctcattttggattttttttgtagaggtgggatctgcccaggctggtctcaaacttgtggccttaagagatcctcctgacatggcatcccaaagagctaggattacaggtcagagttatgtaaaatttgctttttaaattcaaatataggcaacttaatgctttaccataaaagtatgctcatttacatttatgaaaaggaatgttcaatactgaacaatattgaatacgcttaatattcattctgttcaataatgaacagatcctgttgcattatcccttatgggataacataagggcatgtacatataacaatagcatgcatgtaaccatttactctcctcattgtttgaggcagtgtctcactgtgtcacccaggctggagtgcaggggcctgattctcagctcactgcaacctttgcctcctgggctcaagcaattctcctacctcagcctcccgagtagctgggacctataggtgcttgcccccatgccgggctaattttggcattttcttgtatagatgggcgtggtggtgcgcacctatagttctagatatgttgcccagactggccttgaactcctgggctcaagcgatctgcccacctcagcctcctaacgtgctgggattactggcatgagccactgcacctggcctctcctcattcatttttgatggaacctaaaacatgatggtgtgattctgcgtggaactattcaggcagaagagtaaacacagtatcaggaattgatgctgacaaacagtaaagagaacagcacttctttcttttttttctttttcttcttcttttttttttgagacagactcactctgttgcccaggctggagtgcagtggcgccatcttggctcactgcaacctccgcctcctggattctcctgcctcagcctcccaagtagctgggattacaggcgcgtgccaccatgcctggctaattctttgtatttttagtagacacggggtttcaccttgttagccaggatggtctcgatctcctgacctcgtgatccgttcgccttggcctcccaaagttttgggattacaggagtgagccactgcgcccgccccagcacttctttcttaaaacgcagccatgttgagctgttgctgaactttacgacacgattgggagatgaactgaagttagttaagcgaaccatttaaataaacgatcagccttagcattctggggaagtcattgggcctaaagaagataaattttagcattctaagtttctgtgtattttctttaatgctagctttgaaatgcaatcaaatttcagtggaaatagaggcataaactaaatttctaatcaattaaaaaatactttagtggtgggcatggatgggtagaaagatatttagccaaacaagccttactggggggaaaataggtagttagaattctagccaacacttcaaaaatgtggaagtatttacaaagtagtccttagttgggggatgctagagtacacttattaaaatttgcttttggtgctgtggctcatgcctgtaatcccaacactttgggaggccgaagtgggaggatctcttgaggccaggagtttgagaccatcctggggaagatgaccagggggagatgatgtctaaataacaacaaccacaacaaaactagctaggactggtgatgcatgtctgtagtcccaggtatcctgtgactaccctgggaggctgatgccagaggagcctttgagcccagagtttaaggacgcagtgagctgtgattggccattgcactccagcctgggcaaaagagcaagactttgtctctaaaaaaagaaaaaaaatttgctttattttgaaatggttttatactagttagcgctgataaaactatccaggtcgaaaggaaaattaggaaggaaagagtttcaaaggatagggccaaaatgtaaatgagaggttataaacatctttgcattaggtctagatgatgaaaggtttttgcctcagatacgaggatgaccatatgtatatgcagttaatatcacagttaatccccaaatctttttcattcaggtaacaactaaggaaatggtaataggttaaaagtttcgaatgttaaattcttaatatgtagcaaatagcgtgttcttaagttttaattaaggcagcttctcaatgcctgtacttggtcaacctgcagtattctttgcatggttccttattgattaggaacacaagtcctagaacactttgaactcttcaggatataaaatgtaacattctgcgtatttatggcgtaatatttaagataaagccatagaatatgtgagatttgaaagttgccaatgggtataaaaccccttttgttatgagtagtgatcagtaaaaatacaattcaaaatacctctgtagaaaataatacacgaatattcataaagttgacatgaaatttggctgtgacttacacatcttcagtctaataggtgttctttgttttaatgggccaggatctctattaagtaaaaacctaatttaggggtagctaccacctatttccatttcaccctaaatgcagtgtctacacagcttatgttgaagtctttaatagtgtgtttgtcacatgttctgaacagagatttcaaagtaacaataaaaatgtaagatgcatctaagcaattactgaaaaatctgaaatcactaagtaaggaaaagatcaaggaattcttataaatcaaataaataatgtaagataccacatatttgaaattgtttcagttgctattttgagctacatggttgaaatggttggaaagattgagaccttgaccttgtaatactcttgaggaaggtgaagtacattgcaggtacacagtgcacaaattagatattcattctaaaaacttctaatttacagataagaccgagaagaggctagtaagtcaggtatcttaaataatggattcgttgaaactggctcttcagaagaggtgattgcagaagtgcaaagctggctctgaggttaaatctttatgagaaaggaatacctttactttgaggtattaaatggctcagctctgggatatgaaactttttaagtatctttaagcaatcagtgttcaaatcaaagagtgagatgcgtaatctgacctgttaaaatcacaaaatcaggctgggcattagataatgcctttcagtttaatcactcgctgcctggattctggaaaatgttgctatataaaacacataatgtatgaatagaagtatatggtaactgacagacttttgttatacagtgtgataaagtgaatagaacattagaatactaaccgcatgattttgactttggtctcagtttgtcagttggggccttagtttctttacattaaaggagaagactaaactaagtttattctttcaaaagaccctttactaggtgtccttgtctacatttccaaaatattggacttgtccatgaccaaacaggtgggaatgaaggccattattttgattatttttctcttttaagaatttccagaaatatgttctttgtagataaagaattacatatttgtagagttctaagcgttcttaaaattcattttgcccaactccttcctttcctaaaggagacaacagaagctgcagaaatagcctctctgttattattacatagcagcagtctcctgtctttaaatatttgaactaaacacattttacattttaatgaatttaatttacagtgtgatgtccagtattgggattgcatactatttcttaaaacttcttagaactgttagctctaatatatcaaatttcttgttgggagtaagactgcaagttaaaaaaaaaaattagaaccttagtttggaggaaccttaaaggtcatgtcaactgaaaaaatacgaaaggaatggtactgaaaggcatgaacataacagagattgaatgctttctccaggtggagagactccacagtctggcagggactttttgtcctatttaaaaatatagctaacaccagtttggtgttctctttggatgacaagagggatctgtcgttttaatgtcttctctcgcagccccctcaccgcagccccctcacacctgtgaggcttctttgacgttgagcgtgcacaacccgctgccagtccgcggttcccaagtgcccgcgcagccagcttgcaggggagttgtgcgcggtggctacagcctgttgatcccacttcctcctgctctagtccgggctagggagtggctctgccaggacttccaaggctttttgtctcgggtactggtgttcgcatggctcgagtgtattgttttcttccaggcaatctcggttagcgcttcagcttagacacttcttgtgcgttctgtcgtcttgggctgcgtgtagtctcttgtttctgcgctttctccacgcccttcccagtttcctgttagccgaaggggatcgctctttctgaacgaaaagttctcagagcggagctgaacctcccggaaaatgctcttctcttccgtgtgcgccggatgggggtgggggtgggccagaaactgaacgccgccgtcaggagagctgaggggacccgacggccctggcggaggcgggagaggtacggtcctcggagtggggctgggggtggggaaaccgacgaggggcagcccccgactgtcttggtggcagaggggacttttattcagctggaaccgcgcggcgaggcccaagtgtctctggagagattcggggttcaggaggtggcgggtgcacccaagggtgctgggaggaagctccaggttcccattcttccccagggatcggcgttgcccctgctgtccagaagtgagagggggtgtgcgggcatcgccactacggggtgggctgcagaggtttcctgcctcccccaccctcctgtccatcctagggaccccaaccggtagggagtggaagagatgttgctccaaaccctgtcaccccatcctctctacccgcgctggtcctatccgaggctgggtgcgcaggggtccgaggcgggcgggggtccgttacctctgcgtcccaccgtggccgccgctccggcgggaaccgagcggaggagccgggtggacccctgcctggagggcgcctgtcccgggcgacccttacctcgcgggggtagctagggaaacggaagatggcggcggcggccgggcacggggttccgggctccgctcgggcagagcccacccgctgaccaacgccgccgcccccgccgggcggtgctgtgtccccgcaggagtcggagaggatggcaggggccggaggccagcaccaccctccgggcgccgctggaggagcggccgccggagccggcgccgcggtcacctccgccgctgcctcggcggggccgggagaggattcgtctgacagcgaagcggagcaagagggaccccagaaactgatccgcaaagtgtctacctcggggcagatccggaccaaggtagggcggaggaggcgggcctgagggccgcgtggaaagcgggaggtggagagggcgcgggggcgctggaacgcgccgggcgatcccgggaaggcggggaaggcggggaaggcggggaaggcggggaaggcggggaaggcggggaaggcggggaaggcggggaaggcggggatggtgagacggtgaggcggggcgggggctggggcgcgggcggtgcggggaggggtggggcggggcccgggggcgctggaccgcggtgctgcgggacggattcccggcggctgcgcgggaggctgcgagcctgggctcccagggagttcgactggcagaggcgggtgcagggaacccgcggctcggcgggagcgtgggaaaaagctgacgcgcagtcgcgagttcctacttagggaacttaaaaggagagtttcaatttttcttccctgccgttcgggggagcgtgcgcatgtgctggccaaccagcctgcgctgcagtgagccctgctgctttcccacttaggcccactcagagggtgggtggaaggtgacaccggtcagcctttcctgcccctctgcctcctgctgcggtctggaaggcagaagccccgaggcaggcaagtgggacatggtgttcgcggcttaaccgcaccctgcatggctccaagggctggccaggctttcgtgtcgcaggttcccgccaagtgcaggcagggttcagaaccatgcgtccatggttctttttaataatgagaagttacctctgtgctgtgtggacattaggatggtgtgttactcttgttaatgaagcttgtgctgtcgacctgtgaggtctcaaagttaatttttaatttgatcatgaacataccaaagcaaatgcttatggatattaaaggatttttatgtattctaattttcattgtaatttaaaaatcttcacagagagagtctgttatcagtagggaaatttaacgaggatattgaaaacggaaccacaaaatcattggcttggggtaccgtttttaaaaataaatttgcaaaaaattcattctacagttatttttatgaaaaattttccctaaggtcaatgaactcctatttggaaacataatttttattcagtgcctgtggaggccggtaacggtggctcatgcctgtaatcccagcactttgggaggccaaggcaggcagatcacttgaggccaggagttccagaccagcctggccaacatggtgaaaccccatgtctattaaaaataaaaaaattagctgggctttgaggcgtgcacctgagatcccagctcctcgggaggctgaggcaggagaatcgtttgaacccgggaggcggaggttgtggcgagcagagattgtgccactgcactccagcctgagcgacaaaaaaaaagctagtggattaatgtttgtagtagcctgcctccttattttctgaaatacatrtgtgtaagaacaacacacaagaacaactgttgacaagatgcacttactaaagagttagggattcagtcactttagttaagagtacatcttgtaactccttttaatagtgacgtttttgagtttgtagtaaattaagaatatggcatttaatgtgttttttaagattaaggcttttacaaagttagggactttcctaaaagtgtttttaatatttcaaatcttaattctgaaaaaagttcataaactgtgttaatgatgggcaaaatggcaggtaaaaaaaaaaattgtataggggccgggcatggtggctcacgcctgtaatccctgcactttgggagaacaaggtacctgaggatcacttgagcccaggagttcaaggctgcagtgaactgagatcttgccattgcactccaacctgggcaatgaagcgagactgtctcttaaacaaacaagcaaacaaacaaacaaacgtgtatgttacatatttatatgaaatggtcaaaattccatgcatacttatatcaggattaaccagtagatttatactgttcgaaagaaaactgagagatggctctaaattgaattgaatcatgtcaaacaacaaatttgttgggagtaccactgtattttataggtttcatgcgctcgttgtaatagctaagattatatgcttatggagactacaagtaaatttaaaaagcacattatttgtgattttctatctgactttctaataaaaacatttagcacatacattttgccatgagagatcatttttgactatgaaatcaaatattgcttgaatttcaaaagtgtattgaatgtcagaaattcagcattttacaatttctcctatgttagagtgcatgtaagttcatcaacattttcatatatgaacacttgagatcagggtataagattctgagaccagtgagcttcaacctcataccccgcctcctgcaactggactgttcatgtatgtcacagacttcattatttacgtcttttatcacatatactgattcttggggaagaaagtgagagcaatagggggaatttatagaatgagaactactaaatttaacgttggttcccagtcttcaattatgattcagatgagaattaaggaaggatctttagaaaaagacaaatactttctgtgtctccgcacaggtgtgtaagatgggagcacctggaggagaggtaggccctaagattagctcaaagccatctttttttttttttttttttttttttttttgagatggagtttcactcttgttgcccaggctggagtgcaatggtgtgatctcggctcactgcagcctccacctcccaggttcaagcgattctcctgcccctgcctcagcctcccgagtagctgggattacaggcatgcgccaccacacccagctaattttttatttttagtaaagatggggtttctccatgttggtcaggctggtctcgaactcccgacctcaggtgatctgcccaccttggcttcccaaagtgctaggattacaggggtgagccacggcctcagccccagtcatttttaagacagcacaagcagttcttgctcatctatcctgctttgtcagtaggtcaaaactggtcaaatatggaatgcttcatatggttcaatctaatatgtcatcatttaaccagttttttgcagaagtaaatatgggttgttttaggacaatgcactaatctcagctttttcatagtggatttgatggtttttaagtaaagaatggaactggtatgcttttgaaatcagtgtggcttaataaaatcctcatgtgtattttagcaccctcatcataactccatacagtatactttttgttccccttttcattttccatttattcctggtttctttgtatgtctatgctgtcctctctactattttcctcttcctctgttttgaactttttcctttctctgaataacctaagtggaatttcaggtggtctcatctagccactcaggtgctaaacactaaatgattttatgcctgcctttatttcccaaagacaaaaagtcacttatgtacaaaagtgaaagtggtgctgatgcaggaaagccaaaatggagtcctaacacttgtcatatctcttccccctctttaccttcttgagtttttggatttgcattcagacatactgttgtagagaatttcacaggtatttactgagaataagatatttttgaaacaacgctaatacagattcagacaaattgggttttgaggatgaatgtgaaagaagctttgtgtgttttttgttggcccatgaatactgcaacctttcattttatgggaatggctggaagaaacttggtcaggcttacagcctaggattgttcaacaatcataaaccaaacagtataaacaaatgggaaccatctcaatgactttttctgcctttgggtcatctcggctaaggttgtgaagctgcatgtgtcaaaaatactcctgatgaggtttattgtgttctcatttattttttattttttgacatttatatgtcttcttacagctaatggccacaaatgagtctctaaatttaggtaaaacatacctaaacactaaaaagatattcagaattttgcatcaacattttatctaggctgagggcggtggcttatgcctataatcctaccactttgagaggccaaggtaggacaatcagttgaacccaagaattcaagactagcttgggcaacagtgagactccatctcaaagaaaaaaacaaacccaaaagaagaccaaaaaacacaccagtattctatctggattaagatatatttttggtgcagcaaaccaccatggcacatgtatacctatgtaacaaacctgcaggttctgcacatgtaacccagaatttaaagtaaaataaaaaaaaaatcttactactactactaattatatatataactatatatataactatatataactatatatgtaactgtatatatataactatatatgtaactctatatgtagctatatataactatatatataactatatataactatatgtataactatataactatatgtatagaactgtaactatacataactatatataactatatatgtatatatataactatatatgtatatatataactatatatgtatatatataactatatatatgtatatatataactatatatgtatatatatatatttttttgagacggagtcttactctgttgccaggctggagtgcagtggcatgatctcggctcactgcaacctccgcctcctgggttcaagcaattctcctgtctcagcctcctgagttgctgggactacaggcgcatgccaccatgcccagctaatttttttgtatttttggtagagacaggggtttcaccatgttggccagggtggtcttgatctcttgaccttgtgatccacctgccttggcctcccaaagtgctgggattacaggcgtgagccaccacgcctggccaaaaacatgtatttttaagcccagtaaggataatgatcacattcttcaattgatatcttggttttaatttaatatgaaggatgtataagtaaactcttgttcctttatggtaaggcagtatatgaaagtattgatttgcatttttcactgccttacaaagtacaatttgtgccattaaaacattatctttcatcacaaaccctaggtgaagtatgctggggaagccttgctctgtgtttttgaaattgtaggtggcagcccattactgggtcatatggttcatggccagcatttaaaagagaaacagaataaattaggaaatattatttaaaacttttagctagagttctgtgtggaaacatgggaatcataatgatccaaatagatgggaaacagaaacatggccagaagaatattaggaaatgagagtaaagtgatactgacagccttattgctctgaaactcaatatgaaatgagaagcaagtaggaacttttacattttgataggtgatgagcagaaagatatctcaagcaattaacacacatccaggtcagaagttggctaacttttcccataaagggccagatagtaaatagtttaaattctgtgggccataaggtgtctgctgaaattatttaactcagagaatggaggttactaagaaggggagggtgctggggagaactggataactccagaataattctgagaataagttcttattctggagaatagaataaattcttttgtacagtaaggtgactgtagtaataataaagcattgtatacttgaaaattgctaagagtagatcttaaatgttctcacccacaaaaaattaagtatgtgaggtgatggatatattaattcgcttgatttaatcatttcacaatgaatacatacatgaaaaatcactccatgtaccagaaatatgtacaatttttatttgtcaattataccttagtaaagaaaaagaaaaaaaattactctactttgtcattgtagcataaaacagccatagacaatactttaagtgttgctgtgttccaacaaaactttatttaaggacactgaaatttgaatttcatgtaattttcatgtgctaagaaatattattattcctctttttaagaaatcagtttgaacatgtgaaaaccttcttagctcgtcgactatataaaatcaggcggccggcaggatatggcccatggatatagtctgtgggctgtagtttgctggcacctatgttagaaaatggaaggtagtatagttaggtttgccaagcattgcaaagttaaggtgctgttaaatatgatccacatttaagggaccaaataaagctagatttcagtccatttaaaaaatctaatctttgtagaacattttatttttagcttggtttgcgtctttgcttccattttaatgtgaactaaatatagactggaaattctgactctcagtacagtaatatatggtataacacctttctttccattttgattacaagttaaacatgatatcccattattaaagataagagacataataaataatttactaaacctttacatataacttaacgatgccgtattttaaagtatctaaatttagaactctttcacttagtttaagtttgcttgtttgctgttgtggtaaagaggcaaaaggttatatgaaactaccagtataaaggacgtggggccccgttctgtttccagggtacagtgtttttcactcatattggatttgttaggctttacttactcaggaaatgtgtttataagcaaaggttttaattaaagagagtttgttttacatctaagaatagacctttgaaaaaggccataacatgttagtacattacagtttcccttggcaaatttgtttggttttgttggatattgagtattttactctatgactatttagtcactggaaacacatttgtagctgggcaccgtggctcatgcctgtagtcccagcaatttgggaggctgagctggtaaggttgcttaatgccaagagtctgagacaaactttagcaaaacaaggagaccccatctctataaaacattaaaaaataagaaagttagctgggcgtggtggcacctgtggtcccagctacttggaaccactgctctccagcctgggtgacagagcaagaccttgcctctaaaacaaaagaaataaagaaacatttgtatttttgagttggttaaatgattttaaagtggtcaacagctattggtgatagtattaaattaggagttaatgtgcatcattcctattttatatagttccttatttttttttcaaatgatcatatatggtaataattctctccctcctgctttttgttatgaggctatttgggagactgttaggcttctgttttatatgaggaagtacggttaactttgtcatgtgtagggctggaatctctgaccttctcactgtgtcatttgagtatcagcactttttcagaccaccagaatgtaatttagcataatagatctttttaaatacaagcttggtgcatttaattcagaaatttagaaatacttttctatttagcattttattggttacagagcagttttctatacatgatcttatggaacagttgtgtacagttacctaaattttataaatgattatacaaaagtttgaatatctgctgagtaacggacaaagctggaactcaaaagcagttccttctgatgattgtacccatatccctttcacagtggattaaaatgggtgggttccagatgccttgctttcggtagccctgtagcttcttgggcagtgaaactttaatctacagcatgcaatcatgtgtgtgtgcaggcagacaggctccttacttctcttggcctctctctccttctccttcccttcgctcttttctctctcccttagattcctcttttcctctcccttatttcccccttcttcctgctcctgcctttattcgtttgtttaatccatgagcatatctctcatcaatgttttaggtttcatcatgccgttttgcatttggatcctacgtttttagggacagatatatgactgcacatttgaaaagtaaattttgaaataaaaaattccagctgaaatttatattcatttgaattaaacttaacaaaaattattgagactttttaacgtacttttaaaaggattattttagaaaaaaatgcttctaggtacctaactcttcaaataggttttcaaagaaaactgttagtttcacttctataaggtaagatgccatttttgaaaggtcatggtatagtgttaaaaagaatcatgtgaagtaattttccacatggcctattaaaacatatttgaggaaaaaatatgagtaaaatttatttttacctagctagagaatgaaaacgacaggaattttttggcctacttttctccatctcactattttatgtaggtaagaaaaagtgcaagagttttatctgagcaggcacggtgatttgagttgtattgttcctcgacactcttgtagtactttaaaattatgtgatattataatatttgatatttataagaatatataatatctctgtagtttgtgaagcacagtggtaaaatgaacacccgtgaatccagcttcagaatgggaacattttcaatatcatgcatmttcctgtgtgctccttctcagtttactcctttgttgctcctcaattcatgcattcaaagaaatatctatggtgttccaagtactgctgtaggtaccagggatagagcagtaagcaaaaatatacaaaaacctctgccctcatggaactcacattttaatgcaaggagaatttatgaacttgtaaatacttgaaacgcatagtatatgagaaggtgataagtgctatagagagaaatagagcatggctgtgagtggaggtggagtgggaagggatttttaggcaatgagccatgtggacctctgggtgaagagcaggctaagtagaaggaacagcagctgcaaagagggaggtcagtggggctgaagggggttggggggaaccaagtagaaagttgaaagtgagttaacagtgtccaaagtaaggtactatagagaaaagttcttagcctgggttcatgcatccctggttttgttgggttttagagggctctccaccaaagtttatgtctatgtgtatgcccctcagaaggttaaaaccactgatttgtgaaagggaactgcaggtcagaaaatagagataggtgaaaaaaatacatatatatgtagtaagtcctcacttaacatcgttgatagattcatggaaactgacttttaagtgaaatgacatataacaaaaccaattttctttctcattgatgttataatgaaatgatgcatgaaaaagtgttattctaggacctactgtacatcatttcacttaacatcacagtttctgagaacctattgatgttgttaagtgaggacttactgaatacacaatataattccacagtaatattgaactcttgaatataaaccagctgttgtcattttcatttggagaaatgttaaatttgctggtgggttcaatgaaatggagtgagccagcggcatagaatagcaaggttcctggagaagttagatagtgttgggtttgattctcagcttgtcatgtactatattatattagatgacctcagacatgttacttaagggggcagagaatgctgtgcccactgataactgtgtttttctattcttcttggcccaccattagacttccttttccccttgcagatagatggagctatgtaactgacttctggccagtgaaatacaggtgagagtgatgtctgtcacttggcctctcaagctgtgggactctccatgccttatgttttccctcacctgccaggtagatacagattatccagtggaagcagcctggatccctgaatgacttcatggagcagagccctttgtgctcctccctgaatcccattagccacattggattttgacatgagggggaaatagagctttattgtgttaagtccctgagatttgggcattgtttgctatagcagttagcataccctgagcaatacacatcatcactctgaattgaggatttctccatttccaaattggacgtagtattcctaccttgtaaggtagtaatggtgattaaataaatataaaatatgtttttgtatctgtaattattataattattttaaaaaattggtattaaaattctgataattactcctatgtgtgtcttttacataatttaatctgtggtgtgtataggccactgtcttttgttaatgatttttcaagtgtcttttttctttttttttttaagacggagtctcgctctgttgcccaggctggagtgcagtggcatgatctcagctcactgcagcctctgcctctggggtttaagcgattctcctgcctcagcctcccaagtagctgggattacaggtgcgtgccactgtgtcctgctaattattgtatttttagtagagacggggtttctctatgttgaccaggctgttcttgaactcctaacttcaagtggtctgcccacgttggcctcccaaagtgctaggattacaggcgtgacccaccgcgcctggccttcaagtgtcttatgaaaaaatattttaataagaatgaatgaccacttggaggtggtagtggaaataattggccaggttggcttttaggtgcttctatggcctgttctatttaatcttgaaatatctttctaagagccttcttatctgcccttcttcagcttctatttactcttcattctactgcagctatttcatgaaacttcttttgcaaaggcccttagtaattttaattgctaaaatcgagtggtctctagttttcagtcaactgcttcttgccaatttggatgctattgaccacatcttctcacatcttctcttcttttgctttcaaagtttaagttctctctcttttttcttttttttttttttttatatrtatagagtctcactctgtcattcaggctggagtacagtggcacaatcttggctcactgcaaactccgcctaccaggtttaagtgattctcctgcttcagcattttgagcagctgggattacaggtgcatgccaccacgcctggctaatttttgtatttttagtagagatggggtttcaccgtgttggccaggctggtctcgaactcctgacctcaggtgatccaccggcctcggcctcccagtgttgggattacaggcatgagccactgggcacagccaagttctcttatctttcttactgtcttttcactgcctcttagcctctatccctgattcctttatctattgtcaaatgtttttgtttcctagaagtcttaattctgtttgccccttcctaagttaatgtgattaattagattaggctttgaccaccacctctatcggtctttttctagcctgtacttctgagatctgggcctctagttcctttgcctaccagacatttcctgtagggggtcccctagccatctcagtctccgtattctcaaactgaacatatttgtgcagtctactcattcccggccaaattttgctccacagcttttatgtcctgtagaataaattgcctcatatagaagggattgactttttgtcttgctaatcactatcattaattcatttgctttcatcaaatacccatttagtgcctgctatggccaggcatagtgttaggtgctggtgatttagaagtgtatgaaagagacacatccccacccacaaggacctcactcatagtcagtggtcaccaaatttgttcatttctgtatatcttagatcttatttaatcctcatagtaaaactatgaggtaggtaagtacaattattctctcctttttagaaataagaaaaccaaagattagataagtaacatgccccaggtcacacatgtcaagtgacttgtttgatgcctgatttaactgtttttgaagtggctatgttgtctggggtatataccctggggttcattgtcacactccaggaaaacttaggacatggacacacaggaggagtttaggagcggcggtttaataggtagaataaaagagaaagggaaacaacttcctccatagaggaaggggtctccgagcagaaaggactggctgatggcaaatgcactgagttttatattcccgtttgaggaggcggtgtctgatttacatagggctcacagattggttcaatcaggtatgatgtttatatagcacgtgtggaaggctggttgccccaccctaatcttcttatgcaactgggctttcccgttgatctgcgccatcttgtctgctccttacaatacacgtagctggcagagaagggaagatggaactgccatcttgaaaatgtctagtccttagttcctgcaggcattcacctatgcaagctcccagcttgtaggccgctctttgttagaaaatgatttggggctgctttttattaaaaagaaaagccttaccgaggactcccatactcttgctatctgtctaagtaatttcttcttaactcctatatcattatgatatactgtccctttgctgcatgaatctctcatgaattcatttctccctttccatttgctgcttaccctaacttcatttaacctttattatctgtcatttggatttttgccatatatttcctctcttctccattctctactccagtgccagagttatctttgtaaaagagaaatatgatacataatacattttgcataagctcttagactttgcccattactggtgggataaagtctaaattagtcttttctaatttgatactaaatgacctttctattcattcaaccaatttttattgagttctattctaggtgctgagatggtaaaagaacataaaagccctgctgttatagagcttatagtctatcaagggagaagttaattaacgtatacacagacacagttctatcatatagctggtgttcataagcataatgaaggaagataaagcagggtaaagggagaaagatggagagtgtgtgtgtgkgtgtgtgtgtgtgtgtgtgtgtaaaatatttgggttcaattgaccaggatagactctctttgataaggtaatatttgaacagagatcttagtgaagtgacagaagctatgtatgcagatatctgggctccaagcaccctaggcagagccaatgccatggtattccagttgtgttttctgtcactgtcatcctctgtacagtcatgcaaactcttctgtttccaaagtaaggcaggcattttcatccatccaagtgttacaggtatctcccttttcctatttctctgtttgactttttatttatataccattatttccacacatttttcaaaatattcaaaatggtttatattccacactgtgtattaagcttaggtaaaatagggctagaggactatgagattaggaagaaggttagaaggctaatatatagagtgaggtgtcttgcacagctagagatgagttgtaaatttgatcccgggtagccagagcagcaagaccagttataaagtcgtattaccagcgggaaaaaagccctctagattttaagggggaaaagcttttctagctttccttgggggaaccaaagaaatatgttctatcagtctttgatgtgggtgggagtgaggtctgcaatatgttcccctcacctacatccacttgggaggtgtccttatgatgtcctcccttgtgaggtcaggacataatccagacttcaactttgtgtgacagtagttctgtaggagatgtaattaaggcagttttagttacggccaacttcaggcataaaatccaaattatttttgaagattgaataaayggcatgtacttgaaacagttctcgggttaaaccaggtatctgctgaaatactttcaaagtgtagaatctcaggttatctgcgtttttatttatctgttcacttgtagttgatacaaggggatggagtgatatgttcttagctattatgggaagaaaaatctggtatttcttggtggctctcataaaaactggtaaaatgattctacattcaggtttaaaaaatgttctttggagctttatgagtgcattgcagaatattaaaagctgtgtgtattttaggattattgtgaaaatagtgttgacttcatggacctttgaaaaaggtcttgggaacacttgaaaatcctgctagggcaatgtatctggacctatttttttttttgaagagagtgccatgaggatatctggaggaagagcagagcaagctgaaagaacagcaaatgcaaaggttttgaggaagagacacacctgacacattccagggatgagcattcccgaacagctgacacattccagctggtgggaagggagtgaggggaaagtgagtagcaggaaaaaaagtcagacatcaggggagcagtagagaggttgctgtgacaatttccttgacagtttagcacagtggttagcacataattagcacttaatagatgctagttaccatattaatattaaaagaatactattgccgatccattagcaagtttgatctttaaaatcagcatctaaaacaaaccctttaaacgagaggagggaaaaaatgaagcagtggctggagagggatgctggggtcaagctacagcttttttaaaaaagtgaaatgacttttttaggagaaagactgtgggctggcyggatgtggtggctcacgcctgtcatcccagcgctttgggaagctgaggcgggtgggtcacctgaggtcaggagttcgagaccagcctgaccaacatggagaaaccccgtctctattaaaaatacaaaattagccgggcttgttggcgcatgcatgtaatcccagctagtcgggaggctgaggcaagagaatctcttgaacctggaaggcggaggttgtggtgagctgagatcgcaccattgcactccagcctgggcaacaagagcaaaactccgtctgaaaaaaaaawatatatatatatatactgtgggctgaggagaataatctagctgagagaaaagattaaatgatgcaaaaaaagagaggagaattactggagcaatgtccttatatatgcgagatggggtgggatggcgtgaggagctgggcttccctcagagcaggtcagtttatccatacaagccactttatccataaaatgcagtaggggcagaggttggcacttctagaaattattttctgattattttgattttcccagtggaatatgaagttaggtcgtcagctgagaatcaagatggagagggtatggaggtctgaggctagaggaaaggtatgaaatgcttgaacaggggcgtgggaaagggaatagactagagaaatgcagcagtgtgaatatcaagttgcatttagggcacacctgagccgggtgaccaggactctaagcgctgtcagcctggtgtgggatcatgttcagctgcttgggtgcagtaagtgaagtggaggacagggtcaaaccactgttgcggtttgtctgtgtgtgccaggaaaagcgtgggtggatacagtaacaagctctggaaatgatgttggatgaagagtgagggctcgagtcaggtcctagggagtaaccatgggactgagcagctgaggtaggaaggaagagaagactgttggcagaggttaagtccaagaattaaactttaatcattcaaatttaaaaaaggaaagaaagaaaagaaagagtactaaaagaaactgtataattttaatgattttagatatgcattagagatgcgttaataacaggttttgctggggaaaatctctagctcatgtatgcacagctgggggccctctttagtaaaatacaaagaccgttttacttagaacacaaaaagaaagtatcctaaagaaagaaataaatctgatttggatttttttttttaaatttacaaatgaaaccctgaaatgcattgaagaacacgagtcccagtttgagttcctattaggcaagttatataacctcttcaaaccttacttttcctcatatgtaaacgttcataaggatattctgaggattaaggagataaaaccttcagcctggcatacagtaagtgctagtaaatgccaattacgtattcaggaatcttgacgtgaagggcactttttccaatagggcacctccgaacgtcagaagggtgtgagtgaatgagaagctagtgaaatcttccagtcacagggaaagaattctcatgcatgttctgccttggacaagccagaaaccagaactgtttgtaaacctttttgtagattttgtagattgagtatcatctaagtagacagagctttttatcatagatctagctaagattccacagtaggaagggaagaatgttgaaggaaattcaaccttcccttggtaataaacacttctaccttatcatcattcatggatgtcacaacaattttaaattattaccgtttgagtatttgtggtcttactctttctcctcttagagaggcaacaccctagcctgttggatcaactccttcattgtcatttgctatggaacaagggagtggatataatgaagggagaggagagaatcactttatggcattgccttaaggccccagggtgtgtggagtaattgagggtctggagtgaacaggtgagtcacaggaactttactttcctgtacagtggtggactgggggtagttgaagggagaggcgaatatgagcatatgtgagacattctgtaggaaatayttgggtgaggaaggaggccggggtcccatcggagtaagtaagggaaatagccagtagtaaaatgtggattattgtcatcattgtaaccccatgtttgtctgtaggctgataaagcttggggagcttgatgtactctttaattagccacaagcaatgtgatcatatgatatataaaacattaaaattattattattttttgagacagagtctccttcygtgatccaggctggagtgcggtggtgtgatcttggctcactgcaacctctgcctcctgggttcaagcaattctcctgcctcagcctcctgagtagctgggattacaggcgtgtaccacaatgcctgactaattttcttgtatttttattggagacagggtttcatcatgttggccaggctggtcacttctgagctcaagtgatccgcccacctgggcctcccaaagtgctgggattacaggtgtgagccaccgcgcccrgccgaaaacaatacaattgtgaagcagttctacaccatgttcgtagcagcgttattcataggagccaaaaagtggaagcaacccaactgttcactgatggatgaatggataaacaaaatgtggcacacacatataataatgggacattattcagccttgaactggagggaaattctgacaggtcactgtgaggtgaaaggtcgcattttcaggtgtcagggaatctttactgcaatttgctgacattattgaacaccaccacatttagcatattttcacataacaaaaaacactacatgtatgtacttaacattttatagggtcgatcttccttattcatggtttcagtatttgctaatttacctactcactaacatttatttgtgactccaaaatcaatacttgtatgtaatttttcacatgtgaaaaattggagttgcccaatgtgcacattcgcagctaaggttgaacctggctgtgctctgtcttcttgttttagctctcatgcaataaacaagcaccctttcatgacgtggttttgcatttttgtactttttgttgatgatctcactgtttacagcggccccctgtgcggaagtgctgtctggttttttcctaaaagtaaaatgttatgatgtgcattattgaaaaaatatgtgtattagtcaggcttccttcaggcatgagctatagtgctgttggccctgagttcagtgttaatgaatcaagtatacttacattttgtttaaagaatgtatgtatatgttttattaagaatataacatataacatgtgatgttatatatgtcatatatattgttaatatatatgtatatacacatattctttaaacagaagcacacataaaatgaaattatatgttgattaattgacaaagatgttgtgaccagaggtttgcaggaacctaaacctagtatttcccatagggtcagtggttcaatatctgttaatctagagwtgtagtgactttattgaacataactactgcaaataatgagaatcaaatgcgtgttaaactattttaagggaaaaatagtattaatttctgtgcttttcaaggaaaaccaatatttgagttgaaatccatcagtttagaacctatcaaatgagaatagtatatcaaatcagaatagtatacccaaaaatctcttctgtaaaaatagatactagtttatgctttaattttcaacacgcttaaaaaagaatttgaagatagaacacagaattactcatttcatttaagaagaccatttttctctcctcaccaagcacatatctggctttgagataatttgttcatgtcatagaaaaatgtcttttattctagaaagatcataaaggcttgaaatgacaaatagataccattgtgtgtgctaacgccaacattttatattacctcttaatctttagttttaattaattattgccacaactgatctagcaattaatagtacatttcttgcttttatagttgatttaattaattaattaattaattttttttttgctggccatgttttatttgtccttttacttcaaacaggataaccaaagatatagacagtattcaataaaataaaatagatgaaacaaattctaagagactgtgacrccacatgctacatttaacctaattttattcatgcttgccttgggatggggaatagatcattcagtgaaaacaaaatgtcttatcatgtacaacttttaaactataataatgatgtaccttaattacttccatgcacacaattctaacattcattttttwaaaaaaataaacacaattaagacttctagagcattttataataaagtaattcctaattaatttttctttgtagctagatcaagcacctccaaaatacaaattcctatacacagtgagcacgttacttaaaatgagtatgtggaccgccttaggataaactgacatagattcggctaggtaggcaacaaaccatagtgccaaatggaaaaagtgtatttgcaaataaattttaaaaactaagttaatttttataattaaatacagaaaatatattgatttgctaaaataaataagatgtgatgtattaacacttcactataaagaatgaataccagaacatttataaacagtgaatgagtcttattaagaatagtttactacaatacacactggctaaatagaagtgcgttttgtgaagcactatgrgtggtatgttttgccgcatatttttgttactttgaggtagataacacacatataccaaattcagcattcattttcagttgcttctggtatcgtgtgttttacgaaatgtgtacagtatgaaaaacttgaaactactcatgaatgaaaaatgtcttaggataaaaatagatattttcatgcaattatgtacagtctcactgtaaatttcaaggcaaaatttgtttcctgtaaaacagatcattgttctatgagaggatggtcttyacttgtcttagtgcatttcttttgtctcctcctgcattgcattattttgctctattcattttgcaaatgacatgtcagttaaaatgaaaactatctcacatgtagaaaaagaaagtctggattttaaaaaccaagtactcataaaatccttactaaatgacaccatctgattcaagtaaaaaatgacttaaactctagtaataaaaaagacaaaatacatttcataagaatacaaagataaatgtctgctgagtgttttagttcagatgttcagaatgccgctgtatgtttgatgaggaatttgaggggaagatttcatagcagaagctgttaatgtggcctgtattgacttaagtggtgacccaactggactgtgaaactgcrggatgcctattgggctcgagctgcttattaaagaggaactcctcactgttgttcagaaatccttcctcatttctctctccccaagcttcccatcctctactggctcagtttctagcatttcaggatcttctttcctgctgaagaacttgtctaagtaactagtgtgttttccttcttaacttgttcatcctttcttacttcacaaaactgatttatgagaaaacagttctccccatcactcacaaactggctgtcccaagaagatgggtacaaagtttctaattgagccagatttgccattcctttttcctgtttttcttgacttactgactttgatatcaaacttttcaattctagttgggacactgagctattcaagtcgatttaatttatcaacaacatcagtagactcatgttggaaactaaattgaatagttcctgcaataaaggaatgaaaatcaaatccctgattcttttccctttcttttccagccagttgccgtgatgcttcctctagcgctatctgggctttaaccaatccattcctttcacattttgattttcttttcttatcagatttttctttgctttgttctttccaattggaaagatctgtaataagcttgggttcatagtaacagttaacttcattctctctccaaactaagttatctaaatatgatcatgacctcgttttgtaattacaagtatggctacactccagatcacaatatttgttttcatgatgatctgggtactgccaacaaggctcagcagagtaattggtatggaaagcaggatcccccagatacctttcccgatctccatccaaataatttcagggatcgacttgtacttcttcatcagtgacatcagacagagctcttggattaagctgaacttcatcaatatcaaagttgttatgtataggccaatcatgctctgaaaactgacagtcatagtacctttcccagttataaawgtgactgtgagtttcatccataagcaaaatattatgagcttcatcttcaatatgaaaaggatggcttgaaattggcttatccattggaaaagaacatatgctcatgtaaggatgggagagcgcttcttctgctattaaccaatccatggggctaaatgtcaaaatttgttccaggaaattcagtgcttcgcgactaattcmtggaagtagctgagttaaaggtttgtgtggctcagtcatgtgatttctaatgtaaactggaattacgctgagaagctcctgacgatcttcctcatgtgcracaggaatagattctaaagtcagctgcatctgttcaagttcatgtgcacctgcaaaaagggttttacaaaacagtcagcatttcagcagagatgcagcctgcwgcccacatgtcaatggctttagtataattattaggagaaagtaaaagacatggagatctgtaccatttagtaaccaatccttcaaaagatgactcttaygggaataatgaggatccatgatccgtgcaagaccaaagtcgcctatcttcagcaccaagtcttcagtattaatgaaaagattagttggtttgagatctctgtgcagtacatttgcagagtgaatatacttgagcccccgtagcagctgatacatgaaaagcctggcatgctcttccagtaaagggccctgctccagcactttagacaagtctgtcttcatgtactcctgaacaatgtaaacactgtttagttccgtaagagagcccacatcatctgttaattggctcccactgggaccaggaatttcaaacactttcacaatgttatcatggtcaagtcttytaataatcttgatttcacatagagcatgtttgacactctggggattggtaaggacaattttcttgatggctactcttttgtcacaatcattgtctacagcagaaaaaaacaagtaattgcctccacaacccagtggttttaagtccatatacgtagaatccagatcaaaaccatgaatgttcatgagactttcaaatttctctgccactttgaaacccttatgattgccttttcctttggaattgttgaacttgtgtaaacaaggaagaaaactggcatcaaaaggaaagatctttcaaaaagggataagaaaaataattatgcttccacagcaagrtggtttcttgatgttcattgcttctgccaaacaggcctgttgatttccccgtaggtttaaagctcaaaaagctctactcatgttgagaatttaaaagattgcagtactcatagttcaagaaaggggcagcaactctgcagacatttaaagaagacactcaagaaactcaaacagaatgaaatgacatactatgcactcagattactctgctaaacgatttaacatttaacaaaaatgtgaataaatatgcacacaacaggcttctatgaacattctcctcacagtgcagatacattcagtgttggactggtcctgagcagcatcgttctaaggtgctggtaagcactatttgcgttttgcttcttttcttcctttgttgctatatatttcaacaggaacccctggcggctgttggataacagaagatgtcctttgttaatgaacaggtggctccagctcaccacaattaaaatcaaagctactgtccatcttactctgatacaacgggacttctctgactcatcaagagagtgcaggccccgcggacagcccccaatgtcagctcaggtctctggctgtgctggcggcagtggtgtctctgaggccctcactttgccgcagtcaccgccatgtaacaccgacccgtgagagagggccatgttggtttaatttaaaaggaacaaccctgagactagagacattcttagagacagaaggatgtggtttacttttatcagtacattttatttccttttccctatcgtaaagaccctggcatcactactcagtgtttatgtaatagattcccaagatggtctttaaaaataggagctgtattttgctcctatgagttcatattgcttaatgtttgaattagaagaaaaaacttttgttaggtcactttcttattaagtttatatttgaacagttagtaagcaggcatattgaaatgctgtatgacataaccgctcttatctttgaggcaatgcagtgttgtggttaagatcatggactttgtgttttgagaaaggcctggtcttaaatcccagttgtcctatttaccctctaagtgacttcgggtaagttacttaatctctgtaacccagccttatctctgaaatctggacaatcaatgtacctacctcacagagttgtcgtgatgatttgcatgagataatttgagtatttagaactgtggctggaacatattggttcttaaaagagataaattattgtattgatgttaaaagaatatagatgatgttccacagtaagtaaataaaatcagcatctaaaacaaacttgaattgtgatgatcaagaaaaaaaatgtttaccttgcaaagaaatacagatctgcccactgtcatgagacagtggcttcccattagctctgttttagatcatttctaaatttactaggttgtaaaatctcattatgaaagcctagacagggtgatgtatgtggagttctgtttataattaacaccttatagaatgtaatgtttttaaccaatgaatttttaaacaaaagaaaaagggattttcaactaataaaagtccctccctcacctcagaggtcaccttctcagggcgacctgccctggtgatgctatccagcattgcagtccccacccccaacctggcatgccccaacttcctttccttcttaacttctccccttagcactgatcaccaccgaatacactagatagtaccattttctctaaatccatcttctaatattagaatataaactccatgggggcagggatatttgtgtatttttttccctgccctgtctcctgtgcccagaacactgcctgttacatagtcattgcttaaacgatatttgttgaatgaaaaagggaatggttctagttttgagaaattcttttatatattttagctgttatgataatgttcatccttctctttgctatctatttggtaagaggaatgaaattttagagcagtgtcctgctcgatataccctcaagattttagagcaggktatgcagtgtattaattctttgttttctttgccatttattaaaatagtgtgtattttgtgcaggagatcaacaattagtagaatgcagtcctttcttatagtgggggagacagctatatgtacagatatacagatggtctttgacttttgatggtttgacttaagatttttcaaatttacggtggcaaaagcaatacatatttagtggaaaacatactttgaatgcccatacaactattctgtttttcactttcagtacagtactcgataaattatatgagatatccaacactgtattataaaataggcttcatgttagatgattttgtccaactgtagacaaaatgtgagtgttctgagcacatgtaaagtaggcaaagctaagccgtgatatttggcaggttaggcgtattaaatgcattttcagcttatgatatttttagctttctatgggtttaagaggatgtaatgccattgtaagttgaggagcatctgtatatggtatacaaccatgcatgcaaatatatatggtaatggatacatgctgtcacagaaacaaacatagcgggcactcttgagcagatatggaaggcttccagagagggtcacattgagctgagtattgaaatgtggttaatgacagtcgtgcaccaggaaaaggatagcattctagcakgactgaactgcacaatggctttggcatttcctcctagtactctgctatgaagcgtccactgaattcatggaacttagttctcatagaaattatcttgatgtttttgttagactgtctacaacaggaaagatgaactagaaaatttactgagttgtttatactcttattatgatcaaataagtgtttttgaattaaatatatataaaattagagtcattattgtcttaaggtacatagtggaaaactcaataatagttgaaggaagctgatttgtttgcattgctgtgttttggacatagagaattattactggggtaatgtgttttgttttaaagagtaatttggcttaggtattgctattcttcagaatatgatttctgccatttttaaaccctattattcttacagcttcatgtcttctgtcaggtcttcacatcatttatcaaaatttccatcctgaggatgataaaagttcaggtatctcattccaaattggttgtgaaaattacctagatttcatcttcctgttttccttcaaataaaggaaatatttgcaaactttttatttatcagtgacatagtaaaataactattaagatatgatttgaaagaatccacatggaagggcaagaaagacacccttgccctaccttggcatacaggctataacttacctgtttatttcctaacccaaatgatgtatcaaaacaggccactgtctgtattgtatctatccgtccatccatccatccatccatccatccatccatccatccatgcatccactcatcccctaacaacttgaatatagatcctrtttatgtgctggacttacaaagactaatgaaacacgtctacattttagctgttcactatctagtgtggttatctaatgttgaagaaaagctagagacatgcttctaataaatgcataatttaatttagcaaaacagtttttggaaaaatagaattggaatttgaaagtgtgtgccactcatgaaataagggttacgtggggctttgtttcacatggagcatgagagtggcaatgtgtagtaatggagattaagttagtacagcaaacaggcctttatgccttttatacttactaattgtgtgataataaaggagttatgtaacatattaaaacctcagtttcctaattttaaaatwgagatacattcatrtggttggattgttatacagattaaacgagataactgcaagtgagctttgatttacttcttgttttttcatactttttcctgtgttagtcgtgtttctgcagtttgttaaattcatgtgtacattttctagyggtgtttgaaggtgtaataatccttccaatttgttaatacatttagaatagtgcttttggggctagaagattggtggtgaccatgctgtcacattgtttctcactgttctaaagtgaaagaactttataatgaaaatatttatttcatcatgaaagtgtgtctcttgggacccaggacatcaatgaatatgagatctaagtgtaaaagtgcactaaggacttggcgcaacttccactatcattatttttgcaccattgttaatctgtatataaaataactttttctttccttaaatctttcagaagcccctttgaaacttagcccttaacagatttgtcaactcatgcctgttgctgctgctagcttatttagtctactgaaaggttatttattaatgtctacaggttgctggagccactaactgaaacttaagaaaggtgcaggtggggactcttttaagcctcatgccatgatggatgttcatccagtcatcatggttaccatggcaagcactggctgctacctgtttcagcagcttcctcctactctttcctattttcagactgctatctacattttacaagctcattgtcaccttgtttctgccagtgttacctaattccatccttgatttctatgcttctaattgaactttcctgtttttatttttaaaggcaccaaatctccagaacagtcttaaacaatgttataataccataagctttaagtatcatacaataatagccttttcctttttaatatagcccactttcaatgtgattctactttccatttgggattgttgcgtgtaatcctcttatagcctttttctggaaattccagatggtgtttgtaaatattgtgcaagtgtattttgtaaataaattcctcaaaatttagtctatgattttttaaaaaaaccgaagtctgtaggcaccaagacaccaayttaagtttttaaaaatcacttaacaagtaaaatcatttctcatgttgtttgcagcctgtgtaacagactgctgtgtttgttggataggagacagctcaattctttattggcgtaaagaataaaagaattattacacagagagaaattccatgtatgctatatttgtatgtgcagctgatctaaagtagtgattcattttctattacctgtcatattcttgtcacgcaaactttctgtactggccttttggataatggccaattgaagagagaaaagaaaatcaacccccaacatagagctggagggagaaagacacggtatttatatcaggagagtgttgtgtaagaaaacatcgtaaccctcttttttattgcccattttccagaaatcttactgctattcaagttwaggttaaccmctttttgtctgcagttgggtctatttttactttgtttctatgtcttgtgaccataatgttttaacatataatgttgggaatgtaattattttaccacaaataatttatggctcttttccaagaatatataagcaacagaatattggtttaaaaaaagtactgtttagatttttttctttctacagatgtgacagtgtaattcatccaagggaagctgcttgaatctgctaattaaaatgacttgttatagctccaatttctgtaggatgagaaagaagttatataagttattggaagttatgggttcttatttcttaaacatgctgtaaaatgtgtctgtgtgtaatttttttctttcagtagttcatagctgagatttttatcctgttaaatgaaagccctcaaagattttcttcatcaccttttatagaatatagaattatgcatcactttctcttcataatgtttacttactttcttttggcagtttggtttagatattcttcttggtactttcaaattgctcatatttgtaataattcttccactagaccattaataaattctgtaacatagcccctgagagactggatagtgtataaaaagactaaaagctgctttattattctgcccatattatgaatttcacaacatttgtaaaaataacagtatgttttcctgatgtggtttagatctccactttattaatacttaaaatacttaatawattaatacttagaatacttaaacatgagttgcaaacttcagagcagaaaaacatcattagagaaagtctggtatcagaaccttggaaagcttcatgaagctttactattgattatyactggtgacactaccttaatgtttcartagcaagaaagaataaagtcatttatccaagatataaaaaaggatcaatagtatggtcatacaaggaatgacaaatacagttttctgaatattatccatctgaagcagaatagaaattggaaaataacttttactatgcttggccctggccttgaacttttatctggttaatggaaaagttagagtgatttaggtcagcctatttagaaacatcttagactggtttgtctttggttgaaggcattcatattctcttctgtctaaagaaaataaaagagacagctgaccatccagatttaaaggctgtctacttccattccaaccaaatagaattaggataaaaatatccagctataatgtgagctgcaagggtagttyggggttatttcatcagcaatctaagtgatttttctgattccagccctgcttccccctagttctttctctacagttaaaatgatctgtttatttctttaaaagagaaatattttggggaaaatgaatggaaaagtaaaaagaagataatagtctttcatagtcccaccatccagaattaaatagyatgaacatcttgttatatagttgctcctattcttgtttttattttctggaactaaaattactctgttctttttgcaaatataaatatgatacatcaaagaatcaaaagaagtgtagtaagtactgcatcagtgagctttcaatgttggaagcaaaatattttaggcgttttaagcagaaagggatttaattcagggaattgccttcttaaaaaattcctgagaggtcgggatgtgtgaaaatcagaggctgccactggactgtaagtgttaagttgccatctagaggtcaggaggccgctcctattactggtagcactgctgccactgccatagctgtctcatacctacagkgctggtgactagatgccggaatatggattctggtcactgcaaacacatacttctgttggaccttgttttctggctacctgttaacagctaaaagatggcctttacttcactttcaccttycaaatctagtgcatctgattggcagaactcaaatcacatccagaacctatgggagtctgggaaatggagtttttagctttcctgcccatgtgctctgaggggttgggcgggggacatgggggatgcacatggatgccagatgccaacagataataccaaactgaagcataaaactgaaaactctaaaaaaaccttgaaattccacttgccagaaataactctaattaacattaggggtacttcattccagacatactttctatgcatatagacagatagacaaaaataccttaagaattaggttcatacaatagatattttaaaagtaattcattttactttaacatactgacagaatgactgaatttcaaatacattactttcctctcttaaagaggtatattctccttttttttttttttttttttttttgagatggagtctgtctctgttgcccagagtgcagtggcatgatcttggctcactgcaacctccgccttctgggttcaagcgattctcctgcctcagcctcccgagtagctgggatttacaggcacccaccatcacacccagctaattttttatatattttttagtagagacggggttttgccatgttgcccaggctggtcttgaactactgacctcaggtgatccacctgcctcggtctcccaaagtgctgggattacaggcgtgagccaccatgcctggcccaagaggcatattctttaaaaatatatgtacaaagttatggagtatatgcacaaagttatttgtatatttttaaaaaatatatacmaagttatgggtatatgtacaaagttatggggtatatgtgcaatttcattacatgcacagattgcatagtgatcaactcagggcttttagggtatacatcacccagataatatacagtgtacccactaaccaatttctcatcatccattcccctcctaccctctcgcccctccaagcctccgttgtctcatttcactaaaagagggatattcttaaagaaacctctaggtttaagaacagagtaaaaaaatgatttcagttgctttggtcagtgggtttttttgctcttcacccccattccagtttaggtgtgctcccttgacctactaggaaagatgaactattctcactcacggagttcatccctgtcccctcccaccacctcctaactttgtatgatcatgtcgaccttttgttttgtaaccataatgctaactttaaaaattatttttatttgaatgcattcagcactcaccataagtcattttaccacagtttgtgcacttctgagttctttatttttgactctgttcttaattacttgtatttcattgttaagtagtacttccaagaatggtgcatgggtgttttttgagttctttgaggtttgaaaatgtctgcttgttgtttttaatacacaaataacttggctaaatatgacactctttggtcccattttccttccactttcttttgacttttttattgtggaaaaacctgaggtcagcctgattttctcacgttgctttttcgatcaggataacctgaaaaattctttctttatctttgaagttcaataatttaatgtctttgttttcactatacccaaatacaaaattaaattgctacttaacatggtaatttagatttcttcctcatctgttggtgccctttttattgtatgctttttgatgtggtgcattctacagaatagttaatgtttgttagatcaaatgtaagagtgttacagaaggcatttaactgcacgattccagattcactctatactttatgaggtgctgagtttcgtaccatataggtggatgagcacttgtggttatgagatggatttctgccccctgggagagaagttccttcccagctttgttattccttaatgagtatattatgacttccagtataagctcatacctaggccgtattctagtgaaattttttgagtggtcattatgtttggtgtaatgaaatgaatgaactgtttccgtttcttggtcataatctcttgaaaactaacttctgaattcattttacagaaatcttcctygaagagttttagattcggaaaaggctactaaatatgacaattgtgaatgaaggaaaaatcaagtctacaatattatattagagtataacaaataatctttgtgactatttatttgcctgtcctacttttttttttcttgaaatctgtaagctccaggtttccaggcattttctgataagtataccaattttaactgttatttaagctttcctcggaagatttttatctcattatttatccgagttttatatattacagctttttataagattttatttgaaaaaagaggctttattgaatttaatagtttagaactatgaatctaagttcatatcactttacaggcgaggaaactaagaatcagagaagtaagtgacctagcccagcccagccagtaagtcacagagcctgactcctaatttttatgcttctttagccaaacaatactgggaaatgaaagcttggattattctttgttcaaaatttaccatgctatatacatattttttaatattagagatacattttattttgaaataattactatcatggttgccaaatgaattttccaattttatcgttctttattttcatcattcttttctctatttaggttgccatgctactaagaaaaatctttctctcctattttttttttcctggagatgtgttctcgctctgttgcccaggctggagtgcagcggcacgatgttggctcactgcaacttctacctcctgggttcaagcgattctcctacctcagcctcccaagtaactgggactacaggtgtgcaccaccacgcctggctaacttttgtgtttttaacagagacagggtttcaccatgtaggccaggctggtcctgaactcctgacctcaagtgatccacctgccttggtttcccaaagtgctgagattacaggtgtgagctactgcgcctggcctttttctcctatttttaaaattatctttgtatatatcagtttggacttaaacagctccatgttttattcaatgtatataagccattagaattattatttctttggatgcctgaattgtctcagattataacagtaggagccacctcaggctgttttctcaattcttctgatatgtccccagcattcttaagcacttaattttctggcataatgagatatccagagttcatcttgctctctctttgccccagctttgaaatagctctttctccaaggattcctgcttcctttccgtgaagaatagtatttagaaaccaagatctgagccttaggtgtgctcattggtattgaggtgtcactgttcccaggccctctcagtggacagagttacatcttatttatttttgtatcaattaatattgaaaacaatgagttcacataggaacctttgattccagtccaccccacaaagttcattcacatttttttccttagacagtgagaaatgtggctctcattatcctcaatatatttaacctatcagatcaatcctcattgctatcctcattccatgtagtctctcacacctcctgttgggctgcacacgtatccttcttgctctgcttggactctgacactggcactggctcatgaggagacctgcattacccttctgggcatttgacaccccacacttgtctaccttgctcagtctcacctaatggcttttgggttgagttattaaagaagggaaaacatcttacatgtttattgatagcaataatagcaaaagtaaagctattttaaaagagtatttttctagaccttacaattgtatttttaatgaccttctttatgtccttaggattttcatattctttacttagtgtttattctcatgttgtttgccttattatcccaaattatattcagccatcaatttctattacaggatttttccttccccagagttaatacatttccaagacaaagacccattttcttttgaactttagtttatggtacagtgattttgcttgaggtcatggatgattggatctcactgcttgtcctgcagtagaaataatgtttgtaaaataatgctaggttgctccaagtagtcagtattttcaagtcaccattttcaccaggttctagaatgctgtctaaatttaytaagagaaaggcactccatattgacatttcttgtagaaggttagatgccccttctgtggacatcagtaatactctgtatttccctttcctttacatgtacaaattgcattgtcaatttatatttgtttccccactaaagcctccaaaccttgcttgttttgtttaagtatccctggggctcatcacagggcctgttgaagttcttttgaaatgaattgaagaatgtgaataatagttctagttcttcgggatratggaaagctaataaggtttatgctagaggctcttactgctgggactctcttcytgtttttggtttttaggaaaaaagctagaaaatccaacttcagctagagtaacagtagtaactgacttgaaagtatgtcaaaacaaaaactgttaaggtcatgaggattttaaaagattagtgaatataaatgaagatgtttaaagatgacactgttagtaaatatgctgccagtggtcagcattttaaaatgtgtgtgaagcaaaaaacaaaaacaaaaacacaaaaaaagagggagagagatttgcttcgtgcttcaaggaacttgcaacttaaatgatgagaaatccagaggggtggtgatgcgagggtgtggtgatactgtaagtagtggtatgacgtcggaaggtcattgaaactcttttttccgcttgtaaaatggtgacatgctctcctctttctgttttattcagctgcgaggctcaaatggagaacttttaaaaaccatagttatacaaatgcaagtttgggttattttactatttggtaatgcaggaagttctggcggggttcctggcgccattttatctagcgcygccgctgtaggcgtggaagtaccttccctgccctggggtatagcggaagtttggatgcgggctgaactgggcttcgggttggactgggcttctgtggcttccctgagcaactcgttgcttcttgaggacccatgtctgggtcactaacccacccactaatcttttccctttagggagcccaagctactaggacagacaacttaacctctgtctttaaaagcttttaaagaaatattgaaaaaatgaaacaggctaaataaaaagagagagaagagaaaaagtactcctggaaaccaacgatattttctcaagtattgtactttgtaagaaataaaagtggaattagtgttaaacccactttcaagaagcatgaacgacacggggatgggcagcattcctgcccgtctctacctggaatgcaggtagagacagcgaccaaaagtgaccttttacaggtagagacagcgaccaaaatatgagagcaaattatggtgaagccataactagaaattgatcactaacctttaatcasaatctagacataattattgatataaaataactcctggtcatccatattcatgtaaatatattcaatatttaatataaaagacaatagacatttatacatatatgtcttgcatcatagtttgtatacgcttacagatgcttgctccataaaattattttwaaaaatcacttaaaaatttttttttgccatgtttattcacaggtatctcttggaagttctttgctgttcattttattgctgtccaaatagaaatagtacaatctgttttctttttctttgatactacatcttaggaaatgatcccatctgctattcagtgttgtatataagagtgcttgtgtgtttttagtttaggtgtaaatatttaaaactaccagatttttttaaaggaagttattcacaatagcctcattcatcttaaagagttttataattaaaaattttaggtaactagatctatgtttatatagagttaaccttagttatatgtattacaatgtattgcgtatttttaaacaaatgttaaaataacttwgatggctatgttttatttaacctttatatttttagaatataattttacagttaacaatattctttataggttgctacagctaaggattagacttttttttttccaggctagtagtataaacgtgctactagtttatatacccttaataatttgggttggtagtgtctggcaaaatgacaaggactttaatgccacctaggttctaaccataactaagatgtatagcaatttggaaaacagatgttagtggttaatttaatcttgctttattaacctagtgaaaagtttcataatgattgttcttagtaaaaaaaaaaaaattaatcctataaatagatatgtatgcattctggatttctgtttttgctcatgatactttacattgctatttttattcctacttttaaacatgaagcagttgtccattttgagttacccattttatgaattggcatatgatataatataagaaaaaaatttaaatttaggttatgttaatgcagatgatataaaaacagctgagacatgctagatcattacctgaattaatagctgggggatactgaccaatgcagtctttatagggcatgcgaaacctcttagaatataactgaatatgtaaatcataattaatgttacatttcatgctggtgaaatgtaggtgagcaaaatagtttatggattccctttctcccttccccctatgcttctctctccccaaaatggccgtcctgcctgtgaacctctctagaagctgcccagaaatgccatggttccatggaatacactctgagatacattgctgtaaagggaaaagcccagtgattgtgatttggagtttgtggcaataggtaatttgaaggttctgaccattctcaaaatatgagcaataaggctgctatgatatggcagacctacactgtgaaatgttaaaagaaatgatttaagatggtaggtttacagcagagtaagcctattatgtggatggaaaggattgtttttggggaaaaatgtaaagtagaaataacattttcaaagagaacaaaaaaacgagccagagtttgattctaagacataatcttgtgctttttacttgaagctaatatagccagaatatttaagttgaaataattgtttttaaaaaaattattcaactcttggaaaatccaggtatgtttgaagtccatagtctgagtgatctctttcctctatgaatttctgtaacacttaagaaatatttttccaaagatatttrctacatactgatactcatgcatgatgtctgtatttttatctaacctattaaactaagtttttttttttgagacagagtcttactctgttgcctaggctggagtgcrtagtacagtcatggctcactgcagcctctgcctctgggttcaagcgattctcgtgcctcagcccttgagtagatgggattacaggcatgcaccactacacccacctaatttttgtatttttagtaaagatggggtttcatcatgttgtccaggctgggcttgaactcctgacctcaagtaatccgcccacctttgtttcccaaagtgttgggattacaggtgtgagcccccatgcccagcaaaccttaaatttcttataagagcaataaaaacagggatctttcactcatctttgtgtcaaccttgttgcctaaagtgttgctttagatataatcagattcagtaagtgtttattatgaagaagtgagcaaatttccttgccatttctcttactttgctgtctctacaatattggtataaggacaagcctgaaagctatgataactttattgttacatggtcaacctgaaaattttatatttttatggttttgtatactgaggaaaaaattactctaacatatatcttccaactataatttttctcaagcaaacaacaaaaatcagttataatatgttcttttaaaattgattttatacaaatggatttttagagaaaggaaacagttttaattaataacaaaataatttgtctttggcaagatagactaacagggactttctgccttaaagaactattctaaacaatggtctgttttcagaccacaggcagsacatgacagtgatcacttagagaaagagggaaaagcaatgtaagaaacaaacctgggtgtgagccctctgattgtcccaacttgctgcctagagagttttcagaccacagtgctggaggggaaacccaaagaatgccctatggtcttgttgagttgaagcagcagagttcagagtttgaggaggctagaatttgtgggggaaaatatgagagagttgggaaccacacagaaagaaagctctagagatctgctgtgtcggcctgagtctgtggccaagaactattctgtgcgttaatgggagaaaattgttcgaggaaagaaatgccagaaggaaaacacacacacacacacacacacacacacacacacacacacacctcagaacagagtaggcacaacaatccttgaagctcatacagaactaggagtagttcatattcccactggacagagtggaaaggcctcataatacacagagatcctgtagaagcctcagaagggccttgcctcagtaatgggacaggttagccttagastaaaggctgctctggacatgccataacagaacttaaaaagtaagcctgaaatgaatttaagtgtatcccactacaaagcctgacaatatttaaaggaatacaacaaaatccagatcccaacagtgtaacattaataatgttgaatattcattagagcatcatcacacatacaaaagctggaaaattcaacccagaaataggagaaaatgtaaccaatagaaaaggggttagaaatgaaagggatgatagaattggttaacaagttcattcaaacaactactattagtatacttcgtttgttcaaggaggtaaaaaaaacatgaacacaagaggattcataaaggactcagattcaacttctagtgatgaaaatgcaatatctgaaatgaaaatactctgaatgggattaacagatactacagaagtaaagaaaagtcaatttgaagacacagaatttaaaaatacacaatataaaacagaataaaaagttgatgcactgctcatttttttttttttttttgcaatgagctgtgggacagtatcatgcttcttacataagcgtatttggagttccagtaggagaagagagagagacagaaaaagcatttgaggaagtaatggccacaatttccctaaatttgatgaaaattataaattcacaaaatccaagaagctccatcagcttcaatcagaagaatcatgaacaaaacaacctgatagcacatcagaatcaacttgcaggaaaccaggagtaaggagaaaatcctaaaagcagccagaggaacaaagacagattttatgtagaacaaagattaaaaattaatagcagatttctcaacagaaactatgacagatagaagacaatagagcgacagttttaaatggctraaagaaaaaaccatcaacctagaattatatgctcagtgaaaaatatctttcaaaagtgaaggcaaaataaataattttggacaaacaaaaactgtgagaatttatcaccaggagaccttcactggaagaaattttaaaggaagctatctaggccaaataaaaatagtaccagatgaaaatttgcaagttcagagaggaatgaagagcactagaaataattagaatatgggtaaatacaaaagacattttctgattattttccaaattagaggataatcamctttttaaagtaaaactaataatgttttctggggcttataaacttgtgaaatarcagtagaacaaaggaggggagtttgaggaaatggatgtttaccattgtaagagtctcatactgtaaccgaagagaaaatattatttgagtgcacattgtgataaattaaagatggatatagtaaaccttagagaaaccactttaaaaaatagaaacactaaaaaaaagagcatgagtaataagccaaaaatgttgataaattgaatcctagaaaatactgagttaatccaaaagaaggcaagaaaaaagaaagaagagatgagaccaatattaaacagcaaaattgtagatttaaacctaattatattgataatcacattaattgtaagttttctaaacacttccttttgaatgccttgttgggctggataaatcaatacaatccaattatttgctctacaagaatctcactttaaatacaaagatacagatgttttaaaagtaaaatgatgggaaaagatataccatgcaaatgtaaatcaaaaggaaaaactagagttgttatattaatatcagacaaaatagacttcagaacaagaaccattactagggatagtgagggatattacatatgacaaaggggtaaattcatcaagaagatctaatatcctaaatgtgcatgcagccgataacagctttgaaatgcatgaagcaaagattgatggatctgaaaggagaaatggacaaattcccaattatatttggaaatttcagcaccctttttcaataactgatagaacaagtagacaaaaatcagtaaggatattgactggaacatcattaactaacttgacctaattaatatttgcagagcattcaatccaacagcagcagactgtacattcttttcaaatatatttcctaagataggccatattctagataataaagtattaataaatttaatgttttcattttttatggctatggtgacaaatgactgcaaacttattggcttaatacaatacaaatttattatcttatagttctggaggtctgaagtccagaatgggtmtcagctaaaatcaaggtattagcaaagctgtgttctttctggaggctctgggaagagaatctatttctttgccttctccaagtgctagagaccactaacattcttggcttgcagttccattcctctatctccaacagcagcaatatctaatttttcctcacaccaccatctctgcttctctgccttctgctgccttcttctacttataaggatccttgtgatttcattgggcccccttgggtaatccagaataacctccatctctcaagatcagctgatgagcaaacttaacttcatctggaaacttaatccccctttgccacataaagtaaagtatgcccaggttctggggattaggacatggtctctttgtggagggacattactctgcctactacattttaaatggttgaaatcatgtcaaatatattctcagattacaaaaaaattaaattagaaaaaaaacaaaccccagaaaggtatttggaaaattctcacatatttggaarccaaataatgcacttccaaataacccatggatcaaagaataaatcacaaccctaattataatatatttggaaaagttgggtgaaatcccagaggagctgactggaaaaaaggtgaagatgtggctactggagtgggacactctgattttgtggagcaacagtcctggcatctgaggagggaaaactgcacttaaaatagtatcaaaatgaaatatctatgaataaattttaaaaaactgtatgcaaaattgtgaactaaatattataaaacatgcataaaatagatatcttgggtttatatattgggaggaattaatattgttaaaatktcagtactctccaaagtgacctrcagattcagtgtaatccctatgaaagttccagtggcatttttttcataaatagaaaaatacgttctaaatttcatgtagaatctcaagggaccccaaatagacaaaacaaatcttggaaaagaacaaagttggatgtctcamactgcctgatttcaaaacttataaactacaataatgcaaagagtggtactggcataaagacagacatatagacgagtggaatagaatagagagcctagaaatcaacccatacacatatggtctaatgattttccatgacgatgctaagatctttcactagggaaaggacaattttttaacacattgttttgggagaactagatatctgtattgcaaaagcatgaagttagacccttactgctatgatctgaatgttttcgtctcctccaaaattcacattgaaactaaattgccagtgtgaaggtattaagaggtagggctttaaagaggtgattgagccatggggacagagcccccatggatggcattagggtgcttatgatagggtttgagggaatgggtgtgcttctcttctgctcttctgccggtgaggagacagcgttccttctctctggaggatgcagcaacaaggagccaccttggaagcagagagagcagccctcaccaacactgaacctgcaggtgacttgatcatggacttcccagcgttcagaactgtgagaaatacatttctgttgtttataaattactaattttgtggtattttgttatagcagcacaaatagactaagacatttacattacattatatgcaaaaattatctcaaaagtgatcaaagacctaaacataagagctaaaactagaagaacatagatatgctcgtagaagaaaacatagaagaaaagcttcatgaagagtttcattagatttagcaatgacttcttggatatgacaccaaaacatagataataaaagaaaaaataaataaattgaaccacattaaaattaaaaacttctgtgtgtcaaaagacactatcaaggttgaaaaggtatcctaagaatgggtgaagatatttgcaaatcatatatctgataagcagttaatatccagaaaatgaaaagaactcctacaattcaacaaaaatacaaacaacccaattaaaaaaatgggcaaaggacttgaataracatttcttcaaagatatacaaatcattttgtgtaaggcacaagcaacaaaagcataaatagataaatggtattacatcgagctacaaagctctgcatagcaaaggaaacaatgaagtgaagagacaacctacagaatgggaggaaatatttgcaaactgttcatctgacaagggattaataaccagaatatggaaggaactcaaacaactcaataacaacaacaaaaaatcygatttaaaaatgggcaaaatacttgaatagacatttcttaaaagaagacatacaaatggccaacaggtatatgraaaaatgctcaacatcactaatcatcagggaaatgcaaatcaaaaccacaatgagctatcattttacacctgttagaatggctattatcaaaaaggcaaaaaataataaatgctgggattgttggatcatatggtagttcttttttagttttttgaggaacctccacgctgttttctgtaattggctgtactactttatagtcttaccagcactgtatgagtgttcatttcacttcagtcagaatggctattatcaaaagacaaaagataacaagttttggcaaggatgtaaggggaacccttacacaatattggtaggaatagaaagtagtaaagtagtgcagccattatggaaagtagtagaaggttcctctacaaactaaaaatagatctactgtatgatccagcaatcccactgctggctatatatccaaaagaaacgtatcagtatactgaagaaatatctgtactcccatgtttattgcccactgttcacaatagtcaagatatggaatcaaccgaagtattcatcaatggatgggtggataaaaaatgtggtatatatacaaaataaaatattattcagccatgcagccatgaaaagaatgaaattctgtcattttctgtgacatggatggaactggaggtcattatatgaaggggaataaaccaaggacagaaagacaagtattgcatgttttcactcatgtgagagctttaaaaaaggtgaatcttattgagatagagagtggaatggtggttactagaggctgggaagggaaacggggagggagaggatgaaagagtctggttaatggtacaaaaaatatagttagatagaaggagtaagttgtagtgtctgatagtataaaatggaaattatagttaataatttattgtttatttcaagaactttagaaaaaaataatcgtaatgttacaagcacaaagaaaaggtaaatgtttaaggtgatggatgtcccarttaacctgattttatcattacacattgtatacaagtatcaaaaacagcatgtgtacacccaaaatgttacaattatgatacaacaatgcaaaagtacaaaaaaatttaagaagaaggtatacaaatcatcagcaagcacacgaaaagatgctcagcattggccgggcacagtggctcacacctaaaatcccagcacttttgggaggccgaggtgggcagattgcttgagtccaggagttccagaccagccagggcaacatggtgaagccctatctctactaaaaatgcaaaaattagccaggcatggtggcacacacttgtagtcccagctgcttgggaggctgaggtgggaggattacctgagcccggaagatggaggttgcagtgaactgagatcatgctactgcactccagcctgggcgtcagagcaaaactctgtctccaaaaaaaaaaaaaaagatgctcaacatcagtaatcatttgggaaatgcaatcaaaactacratgagataccaccttacacccactaggatggctgctcttaaaaaaaaagataaagaaaatagcaatgttggcaagaatgtagagaaagtgggacccttctgcactgacgtataattgtgtagccatggtggaaaacagtatgatggctctttaaaaaaattaaaatagaattatttcatgatccagcgatttcacttctggtaatatactcaaaagaattgaaagcagggtcttaaagtgatatttatacatctatgttcatagcagtattattcctaatagccaaaaggtataaacaacgcaagtgccaataaacagacgaatgggtaaagaaaatgtggtgtatacatacagtggagtatttttcagccttaaacaggaagggaattctgacawgttctacagcatggatgaaccttgarggcattatgctaagtgaaataagccagtcataaagggatatttctgtatgattccacttatatgaggtacctcgagtagtcgaacttacaaagacagaaagtaggatggtagttgccaggggctgagaagcgggggagtggggagttgttccatgggtgtagagttttggttttgcaaggtgaagaattctggagattggttgcacaatactgtgaatgtacttaacagcactgaactgtacacttaaaaatggttaagatggtaaattttgtcatgtgtattttccctcaataaaaaaaacttgcagaaattgtataacaatgatgtcaaattgaacaatgagaacacatggacacaggaaggggaatatcacacactggggcctgttgtgggktggggggaggggggagggatagcattaggagatattcctaatgttaaatgatgagttaatgggtgcagcacaccrrcatggcacatgtatacatgtgtaacaaacctgcacgttgtgcacctgtaccctaaaacttaaagtataataataaaaaaagatgtcaaaatagcatttctgatctaacaattgatcaactctgatgatacttttaaattttaagcagctttaaaaggcaaactttgactcaaacttgttagtacagttttcatctttaaatatacatttttttcaatcataaattagagttgggcttgggggaaatattagaatttagtgtgagtctttgagaagcatcacgaagttcaaagaggtctgtcttggtatctctgtggtaatgctttgtttgaatgttgatgtttcacaaagrgtttacattttatcttcctatttctcacaggcctaggtctgtgtagtgaattgagcgtcctcagttggatggagttaagagccaaacgtacaacattgtaccatttacaagttttatttcaaaaggagwtttaaatttttatacagtcaaatttctgccaaaagagagattccaaattaatttttgtttatgcaaagcccatatgttgttttccacagtctcaaaaagagtgcaaattgacagattcctgcatctgtatctcacaggatacatatgtatcattgctaccactcacttatttcctgccagatttttagcaattgtgtttkaaaagaaaacctgtagaaaggtagcagaaaacaaatgggtagtgggatatgtgtcagctagttccctaactatagaaacccttgaaataaggcaaaaaacttgtkttaacctgggaaggaaaggaaaaattgggcagcaggatatgaaggggccatggaaggagcrgtgggtcctcctgagacgctttcctgctttataattttttccattttgactgtgggagatactactgtaatactttcctagatatagcagccgctcaataaatgttgactcctttttttttttttttttttttttttgagacagagtctccctctgttgcccaggctggagtgcrgtggtgcgatcttggctcactgcagcctctgcctcccaggttcaagtgattctcctgcctcagcctcctgagtaactgggattacaggcacctgccaccatgcctggctaatttttttattttttgtagagatgggatttcaccatgttggccaggctggtcttgaacacctgaactcaagtgatccccctgcctcagcctctccaagtgctgggattataggcatgagccactgcacccagccaaatgttgactacttttaatgagtgcttaatacctattggtagaagaaattacatgttggagttaggagctgtgtttttagccttttaacttgaattagacactgatgattagtaattttttgttcctcccaattttcttctatattccctctccttcaaagaaaagcaaaggaaactcgttcttcctgtttttcttaaaatgaatttaaaattttaccatctctatatatctatgtgaatatatatttatatgccccacttctataaagcagtatttgatttggtacctatggataactattagcctaatactgccataattacaattcaattaagtttataacctgacttgttcactagttgggaagtaactatgcatttgttggcattctggtttaaaaactttacatttgcttgaaccaatctgtctaaatttatagaacagagtacttacaaatgtctaattgtttattttaaagttatattgtttctatgtcattgcttgttattttcttaatagaattgaaaacttttttgattttatgaatacttatattttgatttttgtaaattcagtagttttaggtcacaacaagtaatgttttgtstttcaaatttaatttgattttcattttaytttaaacttttatgttcaggggggtccatgtgcaggtttgttacccgggtatattgtgggatgctgaggtttggagtatgagtgatcctgtcacccaggtactgaacacagtacccaacagttaattttttaacccctccccacctgcccatctagtagtccttagtgtctgttgttcccatctttatgtttatgagtacccaatgtttagctcccacttataaatgagaacaggcagtatttggttttctgttcctgcgttaatttgcttaggacaatggcctccagctgcatccatgttgctgcaaaggacatgatttcattcttgtttatggctgcatagtattccgtggtgtatatgtaccacattttctttatctaatccaccattgatggacacctgggatgattccatgtttttgccatatgacaagtaatttttgagagacttcaaatttaattcagatcccatttatgtggtaagcttttcagtcactccagacttgcctgttctctcctggcaatgaatttcaatgacttttacccaataatgtcatgcattgcacattctgcaaggtttagtggaattggcaaagatgaataaaattgctaccctactggaagctaatgttcctgttacctgactgaggaccctttcaagatggaggtatcatcatttgaggtggggttgagggaaccacatgagaaaggaaaatgtacaaagattattcagggaccaatgagtttgatcatatgggaagaaaaagtcctgcacacgtgggtttccgtgtctgaagatggttccatttttctttaacacaagattggtggttcatctgggtttagaattctaggtgagaagccatttatctctcagaccattgaaggcattgttccactgagttctagcctccagaactgggaaatcctttacaagctggatctttgtataatagcttttccccagcctttccctccggggctttcaggatcttctcttttccttaggaatctgaaacttcaaagtgaaattcgtgtgggtttattttcatccattgtgtgggctttttgtattccctttcagttttcagttctgggaaattgtcttgaattagctcttccttctgttttctctggtctttctttttggaatcactattatttagatgttggacctcttccacttaytgtgtaattttcctatctccctatctcccccatttttcatctttttgtcttttcattcacacacacaagagaacacgaatacccttgaagccgactggaatctctgtgttggttcagtggggggacttgtcgcctgtgtccgtcactgtttaatcaaactagtcattttgttggtaacccctgttatcagcattttttaastcttttctctcaactttgttagatccccaaataagactcatccagtggaaagttgtagccccagatgccggcaactgsgagcccaataaacaggaaatccagggaactctgaatatttaatatgtaaaatttgtgtaaccctcctgttttcaataatatattcttgccctcagttatttttgggtcttctattccagacattctctgctggaccctctccagaataaacctccagccttattcctgggtgggggaggcagttgcagctttccagaggtgaagaaatagggagtgaggtgcagggggtgtgtaaggggaggaaggagcacttagtgattctaaaatacattttcacccaatccttgttagcttcatcttatcctggcatccagaggtacatggtactgccagtttttgagacatttgaggattgtttgttcaagtgagttgattttcaaccctatatctgtcttctggttgtgctaagtcaattctcagccatccatctgctttatatcttacaaaatcttccagttcttgtcttctctcccattttgttttccttatagttttacacatttttagaagtctcttttttattgggaatgagtagagctaaaagcctacactcattaaggtgtttttaattaggaatttgagaaattaaaactttacacaggtgaaaaaataattaatattataaattgaaaattaggccagggcayggtgcctcatgcctgtaatcccagtactttgggaggccaaggtgggcagatcactggaggccagaagttcaagaccagcctggccaacatggcgaaaccctgtctctactaaaaatacaaaaattagctgggcatggtggcacatgcctgtggtcccagctactcgggaggctgaggcatgagaatgacttgaactcgggatgcagaggttccagcgagccaagatcatgccactgcacttcagcctgagcaacagagcgagactctgtctcaaaaaaaaaaaataaattaatacttaaaagtttgttaatgtgtagtggcatttgtgtcatattttaggagccattccttttgatgacacttacaaaatcaatcagaagattcttaagtatatgattcttcaagtttttattttctttatgttcttaatgtcatgctggtctctttgtgatctaaatgatgcagtgaatatttcataaatacaaataatttaatcttaaatttgttaatagtgtgtatttataaagtgaattttattaaaaatccactaacaactgtttgagtgcatctttgtgctaatgctatgaggtaattatattcttaagctaaagtcagcacttccgaattactctcaggtgagaaaaataacttttaatatgaaaggacacattccggaagtacactggagtgcataaggagttaccaaagagttttcttgttggaaaaattacaaattcataggaaacatgattaaatgccaaattctatattagacttaattgcaatagaaggtcagagagagagaaatcagtgtgggccaggatagyaagaggttgcttcatccctgcttgtgtagccttttgtcaaaaatgcacctttaaaactggactcctcatcttctcgcccacactaattcatagagtcaggtttgcgagtaaccttaaaggtgctcagttcactggcgctttccggctgatttcatcctktcctgcttgtgtttctytgccttattccacattatcaaggcttgttgattcttcctttgtaacaggtctcagtttgtccattcaatctagtgcctcaacatgtttatttaagcatctactgtgtgtcagatgttgtgcagagtgcggggctgaataagggccctgaaggagcctgcatcccttcatgtgtgcagtggacacagaaaatttccggaaaaatgtggggtgtgctaggaaagtgttcacactgggtctgtggcagcatggaggattgatgctgaagccacctggggagaagacctgagagagcagggggtatttgggcatagttcagtgtctctgaagtgtgaatggcggggctgaggccatcttcactgcaggtgaagcagcactggtagtaagcaagggtaaaggcttgaaaggtgtgttacccattcagcaaatatttattgtgtgccaactacgagctaggcaactattttgcaaccgaatgcaacagtgaagaaaacatgaaaagcataagtatgataaataagatgactgagtagcgcgtgtgaaggtgaaatgtgttgtcgaaaatgataaagcaagatgatggagttggggactttgggccctaagctggggttgaaggatgtttagggtgtactccacagaactctgggggctgcagaggtgcttctggggtctataagaattgttctaaattttgttttaaaatatgccttaaaacatttcaaaaacagtaatgaagaacagcatgagcaaacagatacattattgtgaaaatttacacattagatcaggggtccccatcccctgggccaccagtccgtggcctgtgaggaaccaggccacacagtaggaggtgagtggggggcaagtgagtgaagcttcatctgtatttacagttgctccccattgctggcattaccacctgagctccgcctcctgtcagatctgcagcggcattagattctcataggagtgcaaaccctgttgggaacagtgcatgccagggatctaggttgtgcacttcttatgagaatctaactaatgcctgatgatctgtcactgtctcccatcagccccagatgggactgtctagttgcaagaaaacaagcttagggctcccactgattgtacattatggtgagttgaattattttattatatattacaatgtagtaataataaaaataaagtgcacaataaatgtaatgtgcttgagtcatcctgaaaccaccccctccacccccgatccrtggaaaaactgtctttcacgaaaccggtccctggtgctaaaaaggttggggactgctgcattagacaccaccagcgcattaactggtgccgccatggtagctcatgtttggaaaaatgcgtggattttaaaacaattttttttattaattgacttcataatatataattttgcccatttaaacctaaagttgaatttacattaataaaacatctcatttacacattttrtataaagagaatctactgctgaaattattggacattyaccttacaggaattcaacccgccttactcttggattatcatagttgccctcagcaccttcaaattatctcccttctaatctcttttgcataccattgctagagttaattttcttaaatcactaaatcttttaattaaaygcttgaaactcaaactctgtggtgggggcaagtagacttactagttacagttctgccacaaaatgctctgtggccttaagcaagtctttgttttctcatctgtaagaatcttttttgctctcagattttactcccataactctcctcactagctgttgatgatctttgtgatctgtctctagcttatccatccagcactggctcccccactaatctctgcctttatcctctgctctagcatggccattctcttcattcctgtctccttccttctgcaatgcacacaccactagctgattaattatgctcgcatatgttgatgttatttccccagcccagactggcctctttagttcattgacttacattctgcgtatcctttaaaaatagtcttctagaacttatggttaaagaaaatttattggaagaacaataacggcaccaaatgatacagcattaaggcacattgagaactaggaataaaccrtttgatttgttgaaagctgtgctgtctagtacagtagccactagctacatgtggctatttaaattaaaaccaattaaaatttcacacaatgaaaaactcagtttctcagtcttaccagtcacagttcaatggttccatttggctagtggctacgctatcagacagtgcagacarcgaacatttccatcattgcagaaaggtttgttggacagtgctggtcatgggtggcttgaaagttttgtttcagggacttctggaggagaaataatatatttacagatggtccagaaggaaatgtttgataaagaaatggaggtgaggagtattgattctagaggtctgacagtggcaagaaagagggacggggaacaggtaacgtccaagttaaaagaggtatgtgtgtatgtgtgtgtgtragagagagagagagagagagaaagagagagaaataagaacatttttaaaggcaaagaaagttgtggcaatggaaagactggatctgttgtagacattggaagaagagtgtgtaggaagaggtaggcatattggatgtcaggaaaacaagtgaaacaggatgttgagataggtttcattctgtctcagttttggctgaggccccaaaacattaccaagaaaacaataagtggcaatgaaatcacattccttagtgaaggtttctaaccctcagcccagcatcttgatggtgtgattgaagtccaagagatcaaggccggggctgggaaggcaggaaggaaagggatgattccgtctcacctcaggctgagtgagggagttgcaaggagactgcttggctctgttgacttgctctgtgtcctctggaggctgtggagacactaaacctactaaccctgaactagagaagtttagaggtcaaacacctgctggagctacacctgcctggctggctgcagagcaaagaggcagctgcactgggagccagctgtgcttttgctaataaagcagcaggatctgctgtccaggggccaggagaagcctggtggctttttaaaaagtggccccacycaagagtccttcctgccaatggacaatgtggccttggcagtggaggctggaggtgtgcccagcagacgcagatgttggagtgtaggcagcattctaagtgaccacctgcttggaccctgggagctgcagaaggctccttccagcaggaaaacctctgcagaatgaatgaagaagtcccatttgaggagcagacactctgcctagtgaattaaaggaaggagctgactgattcaggagaatcctgctctgcctggaatagcccagatrggggagaggagagacaactttgagtagagtttggaattggggcctggacgttttccctactgaaatgtaacatgtttttgtgagtagaggtgaccagagaactttgaattttttatgaaagactaggaaagccttggaacggagttcattcaggacaagaaatgaataggcttctgaatgactttagatgcctggagaaagcatggctttttgctgcttgcactctgtagggtcctacttacttgggacaatgactatactgatttggtgtttgatgagagtacagaatgtttagaaaagctctsagagatgtgttgagaattaagaagtaagtgaataataacctgcaagaggcctgattgaagagaagcagcaggaattaagtggactgctcaaatgagattttttgcctccctttccagaagaagtctgcmgtctgggatcaggagattgttgtatatttatttggggttatagtgtgggtaattggaagccttgtggttttgtggagtgtcattktgaaggaagcataaggtaaatggagaatgctacttgaatgcagctgggttttcttctgcatgtggtggtgcaggagccctttgatgttattagggyggtagtaattaaacacgtttcttccatatgaaatgattgggatagggagtagtataatatttctgtttctagcatggtttatttattatctacattatatgaggactcttgttgtattttatttgttaggatgctgcagttaacaaaaaaacccacatcatgttggcgaagcacctggagacagggccagctctgactcacttccctctgcgattcccaagtccctgctctcccgcatgagtgctatccttagcaaagtgcctgaatcaattccaggtgtcacatccaggcagcagacagaaaaagggttctctcttgctgtgcaccaaatgcagtcccccatggcacctccacttacctctgattggctggaactgggtcacatctcacctctgaactaattgctaatggcaaggggaaaggaatcctcataagcaatttattaaactaattagtatgtacttgctaaagccaggaatagagtcagcattccctaagcacatgacttggagagaaggagtggatacctaaaccaaatcagggttcggttaggaaggaggaaaggggaaatggatgttgggtagtcttgcacctcttcctagaattatatagaatgactactataactaatcaaaaatgagtgattacggattagatggtaggaacatattaatagtatatatagactaacaagctgtggcaaatgtcagaaatgcagtggctcaaataacatcaaagtttatttctctctcaccagtaacagttcagaggtatgtggtcctaagctggtggggtgcctctaatatagcttaaatattagagttgtaaagttgtaataacaaataagtcccccaaattcagggacttagggaacaaagacatttctctcttatatcccagtccaaggaaagctgctgaagtgagtatctctgttgcaygggaccattcaagggcccaggttcctcccatgttgttgctctgccatttctcccccccagggaattgtctttgcttgggctaaaactgggtcaccacttccaggttccagctagaaagtggaaaaggagaacatgaaggagatagaccagtttataaaggcctaggccaaagtggcacccgtgaccattgctcgcatttcattggcaagatcttagtgacatgggggcttcaaacttcaaatagcctgggatatgtagtctcacagggcagttttcagtgttgcttgagtcgtccctatttctggtcagtagaaagaaataggaccaggtgtctttaagaggatgaatcttaagttgcatccctcatttccgctcatgtcctgttggcctaaagttgttcacatggccagatgctagggaggtcaggaaatggagtttgtagctgggagggtaagtactgggagaaagaatggattatggtagaccattagctgtttctctcacacaaaaatttctctctgctctgcataggatctttctatctggagacctgacttattaaatgttaaagaaaattttatctaatgcctaaagctggtaattcctcatcattrtttggctgaatttggtaacttgccattcttctaccataggaaagactgatattaatagtaaagcaatattacttttttgtaatagacattacaaaaaaaagttccaaaatgctttttataaaatatatgaacttggccttctaaaacaacttgtatagttgtatcatgtgtttatgtacatacatatgtatgtatgtatgtatgtatgtatgtgtagttttaaacctttatgactgtcttagtctgtttagtgctgctataatagaatacctgagattggataatttataatgaacagaaattgactggctcacagttccagaggctgggaagtccagtatcaaggggctggcatcttgtaaggaccttcttgctgtgacatcccatggctgaaggcagaagggcaagagagggccagagagagagagagagaggaaatgagagcaagtgcacgagggggttaaactcgtccttttacaaggaaccccctctatgataacaacattaatccattcatgagggcagagcccctgtgacccagacacctctcattaggccccacctcccaacaccaccacactggggatcaagttttcaacacatgaactgtgggagatacattcmaaccatagcagtgacctaaaattgtatgtttgattttttttaaaaggcatccttttggagatgagtagtgaattatcttctcaaagtctgtttagactttgattctgctactttgatgtggacttctgctttcttatctggaaaagtattgtctgagttgtcataggatgttgtcctaaactttgatgtttattcttccacatgctagctcaggttttctttggtcatgcctacaaactrgtaagctttataagtagataaggagattaaacaaaccttttatatgtaggtaaatgaaattaggtgtcagaaatcctttctagatcttaaatatggccttcgatatatggttagctccctgcaagcaggcatttttctttgttttgtttactgctatatctccagcactctcagcacttcctggcatgcagtaggcactcagtaactatgtttaattaatgaatagatctgtgaaaacaatgtatttcatatgtgaataattaaacctgatttttaccttggaacttaaggaatgtggtttttttttttttaattttttttattttgagacagagtcttgctctgtcacccaggctggagtgcagtggcacaatcttggctcactgcaaccttcgcctccttggttcaagtgatggtcctgactcagcctcctgagtagctggaattacaggcgtgtaccaccatgcctggctagtttttgtatttttagtagagatggggtttcacaatgttggccaggctggtcttcaactcctgacctcaggtgattcacccaccttggcctcccaaagtgctgggattacaggcatgagccactgtgcctggcctcaggaatgtgtgtttcttaggcatctggatgaagtcatctttatttgccatgccttccaagtgaaaagctcagcaagccttcgagtcctgcctggctctgcatactctcagcagaggacgactgcaccgtgtgcagagcagcatagacaatgagagtaacatgtgatatggcctcacatccaggacgtaggaaaagaaatgcttcacttcatcccaacaatgaaaaaagtctactcttttcaagacagctattctcaagtagagtggcatgtgggtaggatgaagaaataaagtaatttggatgctggaatgacttttggggttagggagataaagttagactatcttctaaagattgagtggataaacttaacctgttttatgatttaccttctcctcatactgtaatacagatttcagaattcatataccactgaaaatattgaaaaaagaggctgggcgcggtggctcatgcctgtaatctcagcgctttggaaggccgaggcgggtggatcacaagtcaggagttcaagaccagcgtggctaagatggtgaaaccccgtctctactaaaaatacaaaaaaagtagccaggcacagtggcaggtgcctgtaatcacagctactcggaaggttgaggcaggagaatcacttgaacctgggcagcagaggttgcagtgagctgagattgcaccactgcactccagcctgggcgacagagtgagactgtgtctcaaaaaaaaagagagaaaagataattttgtgcatcacactcctgtgtgaatctattgcaatttacaaatatggctctgtgaggactgacaacatagaattgcaaatgagtgagctctgcttgagtgacatttggaggagcggttatttaagtccagcatttaagggtgagtcacgagaggaaaggtccagggcgggggtgtgcattctgcacctgcagaaagccacccatatgaagaacccaaggtrggaggaagatgagtgttttgtttggccaatggcaggtagaccagaatgccaggagcagacactgcaggcagtggggagtggggatagaagtgatgtttcaagagggtgaagctgtgaagatgaaaccagtgggaggccttccatgccgaattaaagggctttgccttgttctgtagttgatgaacaaccaataaagattttgagcagggaagtgaccagatgagatctgccttaaggaaacaattctggaggsagggagggagtatggaggattaattagacagggggctagttcagtgtaaggaaatacatctgtttttcctgtttctgtccatgtgattgtcttgtgaacagtgggggacttttgtgggactgtggtgttcagttgaggcctgcccgggtaaggcagccccgctgtgagtacaggaacaagaactgcaaggacagatcgtagacaggcaagcaggagggctcggcttcttagctttggtgtggagaccttgagtgtgctgtctctctgagcttgtgctccttggcctttggggacccctggtatgcccctgatgggggagctgagacagaagggtcctagagtctctctttgggctcagaggcatggaggacaaaagggattttgtcctattgtctaaaatggtactttctgtctacttcccttttattagtgccaacctttagaaaagtcttgtttgagtgttctgtgtcacctctgctttattacgagtccttaaaagaagagtcatttttcacactcgggccaaacttcaagaggaatcaaatgaagagttagtgttgtgacaggcaggtggtggttctggccctgctcaccatcaggaggttctttctggtgtgctggtcttggaagcatttcttcatagggggtcattgttatagtctaggcaagaataataaaatcacaagcattaggtcactgggcacaggagcaaaaaggaagaccagttttcagaaaccttttgattggcagattaatttaagggtgagggaaaataaatttaagggtgagggaaaataaaagataggttgggagttctggggttcctaagcagtgcttaggaaaatacactgctgctagcaggtgaggtcataggaagaggagcagaattgccacgggaaggtgcygaattcatttggaattccgtatagagtgacttttacccagtgccgtgtagttagctgctggcaattttggaattagaatctaggttttctgaagccaggccagtgtcttttctattaaactaagacatgtgttacgtgaaataaaatgtacttgagtttcaggtggtgacrgcatctctaagtggagatgtcaggcaggcagttgtaaatggagctggagtgaaaatgagaataaatacagaaatttattttaggagttatgtatatatttagaggagataattggaactatgggaagaagttcattcagagagatttggcacataggctgtaattggaaatagccaaggggtagatttcctgaaaaggagggagtggaakctataatgcatgcagtaaggctgraggaaaggaaaggacagaggcagcgagaggattctaattttttaaagcggttttgtcataatggagaggaaggcatagcttggaagctgggacataatcaagaggtggaaaaagttgttatttttaaaaataagatatgccaacgggaaggaatggatggagagagaacgattagagatgaaagacagagggactagttcaatttagtttaacaaacaaattgtaagtaccactgaggtgataggcatagtgctgggtgctaaggagacaaagatgaagtaaacatgaatctgacttggggacatttactgtctaataaaggacaggaacgagagtaacacaagaccagctggtatttactgagcaccgtgtgtcaggaaccattgcagatactttacatgcattgactcactgagtcctcacaacacccctatggcttagttattgttattatccataaagaagcagaaactcagtcacagaaacgttaagtaatttgttcaaagtctttaacaactagtcagccgtggagccaaggtttgaacccaggccgtacctctgcacctctgtgcatgatggagatggacgattacaccacaacgcaaaggtggaaataagaacaataaacagaagtagcctaagggagagagggcttagattttttyggcaaatgatagagaaatatagaaagatctcaaaggaggaataaatggaagacaggatggatccagatgaagggatgcaagaaaatgctgtcaagaccaaagtagagaacccatgtgcagctgtgcgtgcgtgcstgtgcgtgygtgtgtgtgcgtgtgtgtgtgtgtgtgtgtctgttgctgttttttctagtaatttgcacagccttcatctctgaccatttcttggttccatgctaaccatttcttggttccatgctaatcacagaggacactcacatttgattctcttcatttctgtgaacagttattaataagatatttttaaaaaatctactagaactgggttatcctttttaggggtatcagtctggtccatcaaaatcatcattggagtggagtttatgatattaaatataacatatatatgtgtatctatctatatctatctatctatgtatctaatctgtctacccatccagagaactgacagatttctaactgatttctgatttcccatgtagttgggactcagatattctttggggaaagaactagagaatttcagaggcagattattgaagatgcagttgaaattccagaaaataagcagatcttttgcgtgaaatgctgagtagctctttctgagataactgtatgtggtagatgtgagattcctgattgtctgtggctcagcagtcagatgcctgcacttcaccctgtttcccatcccacccttgaccttaccactgacccccagctcctcctgcagccacaaactgcattccaggataggggacattgtaagcgcagcagtcctgtgagactcaggtatggtgtgaggctctctactttgcacattagttattagttaaaaaaacaaacgtgatgtctagtggtttattttagacaacatcagaatgtccccacatcaaaatagttgcatcattgtggccatgggggaaagtggttggttacatcaaaatgtcatgtgtgggcaaagggattattcttggatgtgagtaggggcatttgataaggaagaagtaaattcagaatttgaaggattcattcattcattcattcattcattcattcgttgttttacccatttacaacacagttacacatacgacattcaggcatttaccagttacgggaaggatttgtgcaactgaagaaaagcccatctgtgttcacatttgagaaagaaaatcctaatcattagcatagcaccactgccaccttgtggtaatgcatggtagttcattatattttatgaaaaaactgttatgtctggtatttatacagcatgtacattttgtaccttctgcatgtaacggtacgttataaagccatatacttttacctaatactaatttaaaaatacactcagtggggggaggaagagcattaggaaaaatagctaatacctgctgggcttaacacctaggtgatgggttgataggtgcagcaaaccactatggcacatgtttacctacgtaacaaacctgcacatcctgcacatgcaccccggaacttaaaataaaaattaaaaaaagaaaaatacattcagaaactgctctaaagaaggtacatataaaaaaaggagagacagcttaattttagaaattaataaataaatgttcacaaaatacagtctcaaggaggtaattacatcattatagatattctcgagaaaattataagccattgcaagggacaaagtacattagcaatcactagatggtttactgatacagagggtgattagaatatgttggataggccaggcacagtggctcatgcctgtaatcccagtactttgggaggcgaggtgggcagatctcttgaggtcaggagttcgagaccagcctcggcaacatggtgaaaccccgtttctactaaaaatacaaarattagccgggcgtggtggcacgtgcctgtagtcccagctacttgggaggttgaggtgcgagaatcgcttgaacctgggaggcggaggttgcagtgagctgagagtgtgccactgcactccagcctggggaagagtgagactccatctcaaaaaaaaatatgttggataatcttcattattttgctttagaatgcataatttatatttaaatgtaaatgtcccaaatattagagtttatagtatttcaaacaaaataataaagatatttgaatatatccagaggtgttggaatacttcactagacagggggaagcttgcttctgtgcatttcttgggcatacattccctcaattaggtctcgcggggcagacataaccacttctcaggtttgcacaggctgcagcataactggcttttgacaggttgaatttcttcctttctggacagggaaaagggcacaggaattgtggtggaaagccattttttttatacctgggttgagcatggcaggatggaatactgcagacagacccactgaagagcgagcgcttcactgggcttcaccctggcatgccctgcacagagagtgaatgctgccagcacacaytacactgtggccagactacagctttctgtcacatggatgtctcagacaaccagaatcagaacatgtgtgtgttttatatgtaaaagtaaaygattacttctagtgaaattaaaaacaaaaacaaaagtcgtatatggtttttgtgaatgaaaacagactattgtacaaacctctagaatattaaatrtcaaggttttatgtaatgttaaatgtcattatagtcaatgcataccatctagccttgtggcttttttttttttttttttgacttagtctcgttctgttgcccaggctggagtgcagtggtgcaatcatagctcactgcagccttgacatcctgggctcaagcgatcctctggccttggcctcctgagtaggtgggactacaagagtgagccacgatgcctggccccacgtggctttggaactstgtttcacagagccatagaattcctcagaggcatcccagaatggggaggctgtgctgcttagattctggatggcctgttcaaagtgcctggtcacatgtatttgggaaaagctcagatgatcctgatacaccaaactgcttgagaacaactactcctggtggcagtttataaaaagggaaatgttttgtgatattgtaaatgacaaatcaccctcatcatctgattgcattgtcattaaatgttgatcccagaaacatccctcaccgccattctcctgtaagcggggacatcattctctgaagctccccttgttcccgctgtagttcttccaccagcatttgctttcctggcgaggtcagcgagacagtgcggggatggacatatcacaaaagggggcatacagcagctggagccattcttctctgcccgtgtccagaaatttcccagcacacagggttgagtccagtacccatgcagctcttattccctcgttggaggtcatattccagtcttcatctgcagttggatctggcttttgttcggatcatagttgagtgtagcttggtttcttgtgggtggctagccctgaagagctacagtgagcatgctcagtcattaaacctaaattagcttctgctcctactcctgggtgggggcagagcttcctaaaaatgtgttttaggaagattttgacamcagakttttaaaatgcacagagccaggtaaaagtaagtggttacacttaatgatattagttaaaggtgcrtggaaaaaggaacaaaagtgctgaattatacctttttaaagggtttatgcaaattattatatgtacaatagtcttttaagcctgataattccaatcaccaaaagagattttagtatgtgtaggttcctatgccctactctaaaccaattgaatcaaagtgcattaatgtttataaaggtctccaagtaatgatcagccagactttagagcaactggcttatttaatagagcttagtgtcatgtatgtatccttatttaaatacagagtcttacatttacttttaagaaagtaggaaattcatggtgggacaaaattcacaaggggaaaggaggataccagcacaaagccaagagtctggagtcaaaaggagctgatgggaaagtttggaggctgatacgaaagccaggcttgaagcagtttcacaggtggccgatgaaggaggttgacagatggaatcagagcaagatcaaatgacttcccttccagacccacgggaggaggagcagtcattgctgagatatgagttccggcatggctacggggaaaaatagttcttatatgataatcacataaaaatatttagaagggcaaataaaaggaaaaagcaatgttatgataggagacacaatatattgaatatattgtggtgaagataggctttaggatggggtaaaacatgggtctgtgtggtttgtgtttggccacctttgaagctaaattatgctaagtttaactgctggataaaatatggaaggatagaaaatctactgtcttttaatttcactctctacaaatagtagttcatttacacattttgtaggtatatctcttctgtatacccrtcctctccacaaagataatattaatgtggacaagatagatagcttcccctaataacaatgaaatggtagtggataaaagcagaatggcttttaatttgggggaaaaaagtccagaatagacaacagctaattgcttatatttgccacagggacaatttgcaagtgaggagatgacccgccacaaaataggcacctctggctagagttcttacagtgctgctgggttcctgccaagggtctgcctgaagagctcctaaagataggcttctgtgcaagtttcccccaaaagccatctcagctactttatcggaatgtcagtgttcattcattcatttgttcagtatatcattactaagagctattatctgtgccaggaactctggtaagcgccagggctccagtgrtgactgaggtggacatggcctctgctctcrctgagcatgcaggctactcagggagacagacatattagtttggggcttattgaattttgaagagccagtggcatccaagtggagttatccagcagcaattctaatcatttcctaattttcactggtaaacaagataagatcggtgttctaagaagtaaaataatatacatagcttgttataaaccatgctccattattatattaaataaaatttcatgattgatttttgcttttatgcttaagatttagaaaactttagacattttctttatgtggttaaattagggttttgtgcaataatttatccaaatagaagcattaggcccttgtccaggattgtctctttatgtactttgtatcagtcccactaaaaacacctttttccccaaagtgtgacctactcaaatagtaccttacttctgatacttcatagcatttcggagtttacaggagatatttgcttatcattttgtttcttcctgacaagtctgaggaatacagggcaggtgatgtttatttatttacagatggggaaacttaggttcatagatatgattacttatgtgaagtcacagagctagtaaatggtggaggcggaagtggaacccagcctggggctcttttacaggagtcaggtctatttttgttttatgcttcctgccagtatagtgacttgctggaaagaaaaatcgaattgtctttttccactgaattcctccagttgttatcaaagaaaaaaagttttaatcgtttaatttcttactttttgtttcctgattcttcaacaaattagttaacatgtattaattattttcttcatatcaaatacttggctatatgtgggatagaaaaataaatgaggtacagtttttgtcactgagaaactcagtcctataggagagacccaggcattaaaaaaaatccctatgcagcatgattaatgctataaataatgcatgagcatagagctgtgggtataccaaggatgtgatagtggccagagctttgaaggaggatgggatggggtgggaggtttagaagaggcagtggaggacgatattgagtagaaggsagagctggtgaaaaagcttggacacagggaagcatggtgtatttggggattaccaagtacttctcttttactttactattaggggaacttaggaggattgctgaagatggggctgttaaggaaggtggggcacttrtggacaaaagagtcttgtatgaccagctaagaggtctggaattatgcgggtgatgggtacaccttgaacatattgaaccagagtttggcagtttttcagagataattttgtccacagtggaaggaatggactagtggtgggaaaaattgatagcatggagagcacctagtaaactattgagtccaagagaattagaggagcccaaaytaaggcaatagcaagaggagtggaaagggatggatttaaggaacaaaaacttttccataataaataatgcttaggatgaggactgttatgatgataatatcttgacatgccatgtttttaaagaattatatattattttgwatccattgcctcacatatcatcatagcacatagtgatatgcaggcattatttccatttcagaggtgtaagtctgttaactatagaggcttagtttgaccattaaagatagtcagatagattcatgatgttacaggttttgtacagacacccaagaaagcctaacacagctttcctggaatttatatgacaaatgaataaggaaatatataggccaaagaaaaattgtttgagaggacacaatagatagtagttagaagagacaggaaagaagtgacacaaataaaatgtagagtgttgaaatctcccctgatccatctctcccatgacgccaaattccattccttagatgagaagtggaggtcatgctgggacatgactggtagaagctagaggttcttctggaattcttgaaggcatctgtaaaagacatgcatcctcactgacctttgcactttacacacctgtttaacactcctctaaaagccagcatcgcatatgaaagtgtatacctactggataaatcaggcagtgcytgatttttcaaggattcttagctttacaaaaggctcatcgaagggctgtttttaaagttgcattctccttggggcattaaagtggttttccatctaaggagcttccacttgtgacacagaggcgtttctgaaaatttaggtgacatcctggagcatccatgtgtgtatataatttaaaagagaaattacttttattttctttaagcaaagggcatgaaatgagcaattctgcagctttaagacattggactaaaaacagttacagaaagccagctatataaaaatttattcaacttgtaatgcttttatttttggaaaacgatttttcraagtcaggttcattgatctttttgcttttaatttttttaaactaggttattggattccagttggagtctatatggctttactgattttccatgagggtcaggtagtactaaaccattaactgccagattatatgactaaatggcagttaatacaaatgtttctaagccctttttgggaggaggggggagttaatgcctcatcctagaatttgtgaacaaagtaaaactaaaacatacttgcttttaacagattcttaaccataactctgattataactatttcttatatttgttactaactttgttattttggttgaacattaatatcgaatataatagcatgatttttaaaaaatgaatctttgtttcttcacttggtatactcattattttgaaatatttggagccacttgcttttttcttaaccacactttgattgtatgattatatttgctagagctgttacaaattaatcactttttggttatgcttgttcttttatgagaagcgtctgtttagccgtacataaacagaagtttattttgaggattaactttcacgtgaataactgcctcccagctaaatctttttaatcatatcttttagaggaaggcaagaatgttttttccttttcttttttttcttcaagaatttaaaattagctgtttgtatattgtaacatagagaggtttgtagcttcgtgaaggcaaggactatattttatacatctttatatatacaccacagcctcacacatcacaggagattaatacatgcttatgtaagatttgaagaatgtaataattctatagaaaaaacataaattatttgctttgaaaatgactctataaggaacatctctaaatgcacaatattctcataaaaaatcaggatagacattttctgcccctccagaggtatacctttgagcgttgtgtccattttcatasacgtgaaaagaaacagcctgaaatctgctgaaccctggaaaccataaaggcatttccrgccaggcgtggtggctcacacctgtaatcccagcactttgggaggccgagacaggcggatcacgaggtcaggagatggagaccatcttggctaacatggtgaaaccccgtctctaccaaaaagacaaaaaattagccgggcgtgttggckggcgcctgtagtcccagctactcgggaggctgaggcaggagaatggcatgaacccgggaggcggagcttgcagtgagcccaggtcgcaccactgcactccagcctgggcaagagagagagactccgtctcaaaaaaaaaagcatttccagcctgtgtttcttgtttactcattgataccatttcccctcaatcaggggcccagcgctttcccgttttctaattttttgtctttgttttaaaatacacagttaccttacataccattgtatactgttggtaaaagttgtttaggtcaactcaaccaacatttatttatggaggccctatgatgtgttacctaatgccatggatggtgatgttacaaaaatgggtaggttgctgtctttgccctcttaaaggccgcgacctggtgggaccataaatatgtggatggacactgttcagtgtcataggtgctgttacacagacaggataaggatgtattagagacccgaaggtgggagtggtggcttcttcctacccctacggggtcaaggacgccttcccagggctaatggtgctggatgaatgttgagatgaatagatttcaagacagacarrtggagcagaggatatttagggcagaggaaggagcttaggaggggtaggccacgcatttggagggctgtgtaggggccttctatggtacatgtaggagcttggactttatgtagcaggcagaagagaactaatgaagggcttgaagcggtggcgtaatttaactagattttcattttagaaaattacacgcaaaaccatgggagaatgaagtaggttatttacatttccttaaaacagtacttttagaacataaatagaccaaacattaacttttcttccccattgccttaaacagaactttacaaaaatccgaatacacccacttctgccatttgaatttccaaatgatttattctttggccaagatgtatttttatagcactttaatgttctgtgtttgggtttaggaattatgggctgcctaccttgggtgacaccagatgctacggtgatgcagctcatcatataactctccggaatcccccttggcagtggctgcaggcttcccgtatttctcctcaaagcatcttgaaataggactgtattgaatgggcatgactggactgcatattttaggcattttcaggaaaagaaataaagaatttgtatgtgaatgaatctgagcaagcatctgaaagaagaggaatggatttagagtaacaaaagactagcatgatgtcacatgacaaagttcagagacgctcctcttagccgaggtggcttcccatggtgttactggtcatctgcactctggtccaaaaagcagtcctgtggtcagtgctaggccataagtcttcagttctgaacacggtgagatggctcttccatgacattcagtgtagtttctttctccttctctcactaactttgttagactagaagctacattatcstcttaaaagtttttagctcttatcccaaggactttctgggatatttaagagtgttgtaatctcttctttttaaaaaaattatttacattatggtaaaaattttataacaaaaattttataacagaatttactatcttaatcatttctaaatgtgcatttcagtagctttaagtatattcacattgttttgccatgtaatctgtatgtttttaaatgaatacttcatattcctttctcatcaagttaatgattatttaacatactatcaagtcttgatttttatacctcttattttttgcacattctctttttaatcataaatgctgaatcaatgttatttttttgaagaataactctcttaaatactgataatacaaactttgatacttcctttctactgtggttatattttccccatattatcttttgacctctctctatggcagtgtccttttatgagtcacaagtgcacactttatgcagcagtgaaccatgaaactggatargacattaaagactctgaaccgttgtttggttatttcaggttattgaggtgtgggtgctaattgagctttcctagtctaaagtgaaaataatatgttacccagaggttccacatctccaatcttggtttgaaaataaactaggactgaaaacatggaatgaaaatatattcttttgtgttttgaaggaatgaatatttgaattcaaattaatttttcttagggtaagcttttcatttttataaaataatgtttaatcatcttgggaagaacaactatgtagtatatcttcaaaaataaaattttcaaattgaataaataagtatatttcaaactttcgaattaggaaatgcctgtatattttaggatttgtttggttatataattattaactactgctgaaaatgcaacagaaaattggaactcaaaatttttcagttattgctctctaacctcaagtaatatcaaattacgctgtttcaaatggtataggagaccattaagctaactgaagacaaagtttaaaagaattattatttgttacccataaccatattaaggatatgatttatttaaaaaacaacaaccaaaaaactaatccaattatttaaaaaacaaccaccaaaacactaatccaatttactgttatatggaggctgtaatttttagttatggtagatctcgaaagttcatgaaccctctaaaattgtatgtaatttttagtgtgtatattgtgtgtgtatgtgcgcacatgcaggcatgtttctggagagatagtattcacaactttcaacagattctgaaaaggcatcttgatccaaccaaagttatgaaccactgtcacagaggttactttgcccattttcctttttacttacagaccccaacccacaactagattttgttccagaagtagtttgtttatgaactggttgtttggaacttagaccacatttttctatgaaagtaataatatatattatacacacacacacacacacacacacaacatgcgcacacacacacacacgcacacaagacattccctgacttacagtggttcaacttaataattttccaattttctgatatgaaagcagtatgaattcagtacaaaacgtactttgagttctcatgcaaccattctgttttcactttcagtgtgatattcaattacatgagatattcaatactttattagaaaataggctttgtattagatgattttgcccacctgtaggctaacgtaagtgttctgagcacgtttaaggtagattaggctaagctgtgatgttcagtaggctaggtatatgaaatgcatttttgacttacaatattttcaacttatgatgagtttattagtatgttcattgtaacttgaggagcatctgtacttacataaattatagaaccttcacaatggtgatacaaagacaaatgagatagacctcccggactccaaggagtttataatccaggccagtkcaaaaggcaggtaaaacctatcctcagttgagattgacctcctaatttgcctgtgaccttcctgttcatttttctgcagctatgtcaggactcattccttctcaccactacacccatagaagtattaggcaactggtatccttgggattcagacacatgagactatagcatggggacttaagcgttaaggcagatttatgacatggtttctatggaaagatgtactcctagttctaacttggaacccaggttcctgggacacagagagtccttcacttggagcctcattagtggatactgtctgtgtgatgaatgaagagtacacctcacctccgccgtggagtctctccctcaagagttctttacacagccagaataaagaccttctcattactaatgaccatttgtgtttgaaatattcataagtcagacttttctttctgaggtgcggcatgaaaaattttccccactaccccaattaggttcttgatgagggacatgatagttctttgtagctagactacataatttctggtagaacttttataatatatgttagttgttgaccaaagggagaagctaaagggtgaaagagggcagaaagagaaagtggaatgagagggcatgagtgcttcatgatgtcatcacaagatttagcttctcattatgccacataaagagtggcagtttcttagttcatttttcttgcttagaacacctgaggctgggtgatttataaggaaaataaatttatttgttacagttctggaggctggaaagtccaagggcwtagctgggcatctggtgagagccttcttcctggcagggactctctgcagagtcccaaggttacacagagtatcacatggcaagggggctgagcatgctaatgtgctagctcagatctttctttcttctcttgtaaagccatcagttccactctcatgttagcccattgatccattaaccattaatctatgtatggattaatccattcatgcaggcagagcactcatgaccccatagcttcttgaaggctctaggtctcaacactgccatattgaggattgtatttcatcataagtttcagaggggacatcaaattataatagacagtgtcagtctttctttataattcttcatgttttctacaggtcctgggaaagctttttagattagactgttagcgtatcttgtcattgcatatgatgtgtgcacatattttgaaacatggatcaagaagacatgctccacctatatagatgaataggaggaaattttgtcttcagagaatacagcaaagagtggtcatgttttggagttaaacatgaatttacactaagaattataattactttagccaaataattttgcaagatgttctttgatttgactaaaaaatctgtatgatccaagaccacaataatttttagcgttataaaaagatgtgactaactttagaaaagtcagattggattagcttgtacattcaccatttgctaccaaaaagccaacgtagaggactgtggtctatttcttagttacatattagctacattaagtcgctaattcctcaaatatggaggtgcctctttatggatatgcaaaatgtatattataaatttcaaaagttatacattttatgatgttcctctaatagtttatctacagggtaattgctacaaaccagtattttagataattatacctgttcatattttctaaaaaaaaaataaagcaatgtagacaggaaattagtaacagaacaactgaaaattggaatgactagattctatgttgagattaatagtcatgcatgtgcaaataatgttttcccatagaagataatctttgtgactttgggttagacaaagctgttttagatttgacatgattcataaaagaaaaaaattgataaataggacttcatcaaattcaggatcctctgctcttcaaaagatgccattaatacaatggaaaaaaaaaagtcacagactgggaagaaatatttgcaaatcacatattagataaatatcttgcatccagaatatgtaaagggcatttaagatgcaaaaataggaaaacagttcaattttaaaaatgsactaaagattcaaacagacatttcaccagtgragatgtgcacatgaaaaataagcagaggaaaatgctcaaagtcagtagtctttagggaaacgcacattaaaaccacaatgagatactatgtacctattagaatgcctaaaattaaagtgactgactgaatgttggtgaggatgtgaagcaactgttggcagcagaccagtggttgcctggggacaggtagtgattataaagggatgcaaggaaagttttgagtgtggcgaatatgttcagtatcttgactatggtagtggtttcatggccatatttgtatgtcaaaacatatcaaattgtatactttatgtgcagtttctaatatgatcatgatatctcaataaagttgtaaattttttttcctgtaatgttgcttcctttggtttgtatttctgacttaattggtgataacatagattttatttcaggggtaaattctcaagatrtatgacatttaaaatatacaaaatmattagatgattaatatggatttttagtctttctggtataaatgtcacataataaatctgaatatttttgrtaactgacatgtagctaatactgatacgcacttactataacactctcagcctcaatagatttaaataatttgacttatttagaaatttatatcatttatgtttttcccctttttaaaaatacctttgttatgcatgtgttttaatttttattgttataagcaaaactttagtgtgatttatggaataaaaaggtaattatagaatataagtcagtgtgaattgctggtacatgttatttcctttctgtattgggattccatgttatgaaatattgctaaaaataagtaggctttggggtgagacttggggaccttttaattcctgctacagtcagtggtggtaatggtgtatttggtgatgggatttgccctgtgtttacatgggtcctgagctctggtgatgggagagatgatagaagataacttattcccatccctgtatattaagctggtaccatgtggtaggacattgaaatggttgtttacactataaaaaatgagttgcaattataaaaacaaaggcggaggagggaggccwtagaatgctggcattaaatcttatttttcttaagagtctgtgcaaaatggggcctggagtttcactccaggagcacttttagctgctgccacatgaagcttattaagggcaagattttctcctgacacctggcctttctcactgcttcctctcaggagacytctcttaccattgcttctgtgtggactccgacagctataattggtttagatgtgcagctagaccctcccctagtctaaggcagtggttttccaccrtggctgccatttgaatcgccacctcctttctcacccgtttccccattgtcactttcctgccttaaacatttccctagctttttgcacttagaagaaaaagcacactccctgttgtgtccagcatattctgactcttgtctcctataacctcctctcttgatacagtcctactccagctgttatttgtcctgacagtggctgcaaacacttatttacttcttacaagaagctcttataatttgatgcctggcaaacactccctggacttaatagcataatgatatcataataataacactttctgccatctattgaatgttttctctaacccagacagtgtgctaagtgctctacaggcattatcttataattaagttagatgcaacaagcttgtgaagttggtattgttatttccgatttttaggagasaaaactgaggcatagagttggggtaatttgtccaggttcatactgttattgtatgctggagcctggcttgaaatctgtctgtctgactctaaatttgctctttggtactgactttcaaaagtgttttgttacgattaaattgtaatgatttcataacagttccaggaagacagtcttagagcaagctgtagagtaaaattcttattgaaattcaaagtaaatattaactcaacttaactgtcttattggagacaacaaacttttctcaatatattatgtctttatggtagtaagaaatagtgtcatgtaaaagttggaaatgaactgtggaatcaracagacagaaatatgatctcagcacctgccatttattcatatagatctcattatcatatrtagcagataatgttctaggcactggagatattgtcagtgtgcaatccagtgggatgattaaaaattttggttctacaagctgtttttgtcttggaggctcactatagcactgtaactctttattgaatgctgtataaatgtgatccatcttggaccctatcctaagggggtctatttgagccagtgttgtgacatggcctctaaggtaatccyatagaaaggctctagtgtagtttgctttcttttttccttcctytcttctttccatccaattaaaatgaaayattaaatttaacttttttagatataataaactcagggaccttatattctaataggggtagcacaataaacrtagtaaattacattatgtgtcasaagatggaaagtacttcgtggggtgggtaataagatcaggatgggggaaaatatggtgagcaagcacaagtttcagtgtgaaacacgcagttactcaggtgggtctcattgagatggtcaagacctgaaggaggtgaaggggtcagccagagggatatctgagggaggagaggggaggtagtgccagcctacagcaggagtatgtaggcccactgcagaagaacgcagccattgtgatggaggaaatcaagagagggaaacgctagatgaggtcagagaggttcaaagtattttgctggtgaaaacaaaatgaactagcatacctaaggcacttaaccagagcctggcccagggccacagagtccctgcctacctcttacagctgcmtctccctctgctccctcttgcaaacttttcactgcatttatagcagaaagctctttgaagatgcctcaaatatccrtgttgttttaacctttctacttttgcacacrcctaaaatgcccttcccccatctcttgtcataaactccttcaagacccaccttgggcccttgtctgggaacattgctttgactccctctgaggcgagttgatgcttccttctctggaccacctgcatagtactgtgtatatgttagaaataacacctggctgatggtaactaactttaatgagcacatactatacaccatgcactaagtcctttaacgtgtttttcatttatttctcacaacaaccctataaggtatgtcctattgtcatccccattttacagatgaataaataaagccatgaagaagtttagtaacttgcctgagatcatccagctactaagtggtggcaccaggaggtgaacccaaggtttctggctccaggacctctgctctttcgtaatcatattatactgcacctccaccatacttamtatatacaaggcagtgtgcacataacactgtattgcaagtattagtgtatgtgcatgtgtcttgcctattatttgtgaattctttgagggcggrgaaccatgtcacattcacttttgctctttggggctttgcacatatgcaaagctgtggtgagagtaaaatattctcctgtaatttgtaagacatgagaaatattattcaaaatgttaatgaaaatgcmccattggctctgaatttcatttggttttgaatttcattttaatcgtgtcattgtgcttctgcttctctctagmccagtattaaagagggacagctattgaagcaaaccagttctttccaaaggtggaaaaagcgatacttcaaacttcgaggccgcaccctttactatgcaaaggactcaaaggtaactcrcgagaatactagtttcaagcawttgaggctatggatggatgtaaaattttggttctgtaagctgtttttgtcttggaagcgcactrtagcattatgctcttatatgaattcaatataaatgtgatctatcggtgaccccatcccaagcgggtctatttgagtcagtcccataacaggtccctaagaataatcttttaggaaggctctagtgtagtttcatttckttcttcctttcttctttctttccaattaaaataaaacattaaatgtaaccttattagatgtaataaacgcaacattctgggtttccaccttttaccttgtaaatctttccctgaccatgagagagagagagagagagagctgctrtagttgctaagaattcatgctctgtgttcagacaagagctcatatcccacttccagcatattccaatggagtggctgtggacagcatgtgttgctgagaggaggcttaaaggagaaaatacacatcaagagcttccatagtacctgattcaaaataatcactccagtatgctagcaattaggaatacaaatcrtattgaaataaaatcaagacttaaaatattttttatataaccattgaatcaaataataataatatagttttgggagaagcaatttgtaaaaactcgtattttagtattcaaaaataaattaagatttctggctactgtgccagttgaataattaattattttcatttttataaatgtatgctcctgatataattggtagggttgtacaccaggaggtaaaaacaagcaaacaaacctaattctaagtttatgtatctatagaagtaataaccatgtaaaataatcttattttacaagtcattatgttcaaaattgtccctgatctgtctccatcctgatttttcacatttatctctagacagcattggctatttgacagcctccagtttgggctcatgctaccatcactaggatgacttttccttttccatytgcacttgacaaagttccctgttttcttcaagatcccctcaaatagtccttattccatgattcacgagagagagttcagttttctgctggataaatcatctgtgatcttctatagcatttcattgtatttcttctcttttaattgtctatcttaccttaaagttagttgtgtctatttaatctcctgtgctagactgtaggttccttccagtcaacgaacaagtcttacagtcacattggttgaattgaagtagactagttctacagtctacttcagtttcaagttccgctgtcaactacttcaagttctagtttccgcagttcttgcggtgcaccgttatccctgccttgctggaacaacgctgaatgagtatgaacaatgagtgactaaaagtgggaagcctacatttattgactaggatttcctacttgctaccttggatgttaagagtatacaaaaaaggtcatctgctacttgcaaagcaaattcattacctcatttgaacgcatagttatagatgaggaaaataaggttcagaaggttcagttacttgttgtgagctaagccaggactggttctcagctctcaccttgcaaacctggaaacaatgatattgcctctgcctccctggcagagctgttacaagcttcagagacattgcattgtgcatgtgtatgccacrcactcagcaggttccccgtaagtggtagctgttatgcttccagagagcacagcacatttgcattgaaacagtgttcccagggtgtctttaaagcccttttcagttgrggatttatggattagttgtactttatgcttttatttttcctttctaggaagaaattgcagaaagtaccaccaacttaacttttttcccccattttctattcctaattcctgtattgaaaaaatgtattgaagagcattgagttaggttttcttctaatgtctttgtatgttttttttcatyaacagtctctgatatttgatgaagttgacctctcagatgctagtgtagctgaagcaagcacgaaaaatgctaacaacagcttcacggtatggttatattctgctaactcccttctcaaaagttatagaatgacctttcttaagcgtgtacagaatgccctgttcaattacaaactgttgctaacttatgcatgttggagttcctaccaacacaatcagctttaaatacactgtatattctaacacccagtaccagttatgactcagttaacctgaggttaaatatactttttaaaaattttataatttttcccttttaattttagtgctttaagtttttcacctcctctaaattaatacttcaattaattccattgttcttgaatatttaagaagtttatttaccttcagtcttaaatataatattttctccatgtagcctactttcactccatttcaccccagttgccatcgttcaggcagttgccatagttcaggtcacttctcacttaggtgattcattcggcagctctgttccagtttcttcttttctgatcacagatcacattgcttaaaaagacctcactggttccacattgcctgcaaatggcatcccccaactcagtcttcagatcttgtaagatcatgcctcagcattctagtattaccagacaatttatttgtccttctctgtcccaccagtgcagcaattctacccrtgcctatgcttttcctgttccctctgacttcagtgattcctcccccatctrtcacggtgggaatcctaccaattcttcaaagcttatttcagataacccatttttttccagcttctttcattcacaaagtatggattgagttcccaccatgtgttaagcacaagaaattcagaggtgaatgtgtatgtatataatttccctcaagatattcctgacgtcgttcagcccaatttcatgtgggctactttttataactacatactccctaggtcttcaaaggtgcattgttcttgctgtgttgtcactcccatccacactcccagtcctccctggaaagctaccactcctgacagcagtgtgcagtgtccatcccctaggcatgacagagcaggggagacagactgctaaacaggtgcacagcggtgccatgatagaggtgagcactggtaggggttgggggaagagaggacacaaatgaattcagatgttgccttattgatttatgggcatgtgggttaattcatagtgtaaatattcctccccgtctcccctgatccccagggagagtttagtttgagaagaggaaagccaagaatagagtcctgggaaaatgttaaaattcaaggtttaaccaataaagactgagagcattcttaagtaaaggagaatcaggagtcagtgatgttataaaaaccaagcagaagagagtttcaagacagatgctttgacacgtcctatactgtagagaggtcaagtcaaagaagaattgaaaagtgatggttcaatttgttaacttggaggtcatttgrtcccattgatgtgagtagtttcagtgtggggcaggctgggggcaggcattaggctgtactgtgaatgcaaagtgaaaggcaggcagagacaaggtaggtaactgttttctaaaagcttggctgttaaaaggagaacagagatagctagtaaaatgtttcatccagaagagaattttagttttgttgttgttcttttgttgtgttttaaaaatgattttgaatgcayttatatgaagagaggaggaatagttagaaccaaaagttgaagactcaggagagagagggaatgactgatgaagcatgattgctgagtaagctgacgggtgtaggaatcagagcgcaggttaagagatcagcattgaacgggagacagaaagcttacagaggcaggtgtgaccaggaagtttatatatttcaaaaccaaatactgttttctcattgaaattgaaggataaggttatttgctgtgagtgaaagttgaggatggttaatagtggcttctatagaaaaagataatcgaaactgaacagggacctatagatgattactaagtagtgagtggtgtctaccaaagattggagatcaagtttagtaatgtygttactygctgtgcttataacattttctttaagtgggagtagagaacaaacaaatgaattgatccagggttggtggtttatagggcatattggacagaaagagaaagggagagattgctagatatttgagggattgttaactcatccatctccctgctcttctcagtttttgagactacagtacaaagagtaggggacagctttggctgaacaggatccaacaaccactaaatgcagagcttctgatgaattgttggagacctaaggccaaaaccttgcttattccttctttcttccacttgaaggtggggtagggtgagatagaaagaacttcaccaktcctactagtaggattagccacttgcttttccctgagcagtgaagaataatcgtctctctgctggagcctcatggagggtgaataaggttttcccccaatcaacatttatttgttttttaatgctttttatttttttaatgacacacaatgattgtacatatttgtaggatacatagtgatgtttcgatatatgcaatgtacagtgatcagatcaaggtaattaggatatccatcatctcaaacatcaaccatttctttgtgttgcacacattcaatattttcctgtggctgtttgaagctatataatatgttattgttaactatagtcatcctacggtgctatagaacactgaaaattattcttcctatttagctagaattttgtatcctttaagagtttaatctgaaagagggtttcagaatttaagatttgaagcatgcattaatttctggtgaagacaaggtctagggttttggagtaggaaattattcaaatccttatacaggtctttcttggcccttcarctgggcttgtgatctctcctgtaatgtctttcttacagaatttagcatatgctgccttatacttagttaagtatttatttttgaccaggcacagtggctcacacctgtaatcccaacactttgagaggctgaagcaggaggattacttgaggccaggagtttgagaccagcctggggaacatagattcccatctctacaacaaatacaaaaattagctgggtatggtggcatgcacctatagtcccagccactcaggaggctgattgcttgaggagtttgaggctctagtgagccatgatcccagcctgggcaacagagtgagaccctgtctaaaaaaaawttttttttggccgggcgtgatggctcacgtctgtaatcccagcactttgggaggctgaggtgggcagatcatgaggtcaggagatcgagaccatcctggctaacacggtgaaaccccgtctttactaaaaaaaatacaaaaaattagtcaggcatggtgccacgtgcctgtagtcccagctacttgggtggctgaggcaggagaatcgcttgaacccagcaggtggaggttgcagtgagtcgagattgcgccactgcactccagcctgggtgacagagcaagactttgtctcaaaaaaaaaaaaaatttttttttttactatttatttttattataacctccttgaggatagggactctgtcatacctttttaatcttatggtgccttatccataagtatttgttgattttaactaataagatgaatgtttattttaggcatgagaagactttttgttgaaatattttgaagaagtttcttcattcaaccaaatactatttttttagtttactggactagaaatatagggactggttgggcacagtggctcacgcctataatgccagcattttgggaggctggtggtaggatctcatgaagccaggactttgagaccagcctggggaacatagtgagacaccccttctctacaaaaaaaatccaaaaattagccaggtgtagtggtgcgtgcctgtagtgccagctattctggaggctgagatgggaggatcgcttgagctctggagtttgaggttgcagtgagctatgattgcaccactgctctccagcctggacaacaaagtgattccctgtctctaaaacaaaacaaaacaaaataaaagaacaaagaacaaagaaacaaaaacaaatgtagggactaaaaagttaggcagattgcttagggttttagagcaaatgaatttggtagaactttccagggtataaaatggagcaagagacatgttttcaaccagtaattgacaaaccttcctctctttaaatatttaaatatcttaccttcctcaattattgtgactgctactgatgctgttattgtggctggtttgtgtcagaggctaatggtgcagtttggtgtattatggctggaggatccaggaatggccaaattcgacttcatttcagccatccctcctcttgctgaagtttctaagggtgatatattgacaaagtacaatagtgggtggaaactacatamacggtaaatggaaaatggaaaacctgtrctttgcctgaaaacccagtgctgaactctctggtaaaatgggttctagagatcagggcagtgattgacctagcctgggaagttcctcagtgtcatttccacgacattcagttggtattcaattggtatgaatgagtcactaaggccagccaggcttcaaggggggccacagacattaagacagtcgtgtcaraggatttgggacatgatttaaaacctacacacagtaagattactcttcctttcttgtgcagtctctcactcccatctctggagttaataactttgttttttcagttatctaaattgcctcaggtattctattagttttctattgctgtataacaaccaaccacaaacttagtggcttaaaaaaacaaagcccatttatctcagkttttataggccacacagtattgctagattcttctgctccaggtcttacaatataaataaatagayatgggttgggcagggtggctcatgtctgtaatccctgcactttgggaggctgaggtgggtgggtcacttgaggtcaggagtttgaagccagcctggccaacatggtgaaaccctgtctctactaaatacaaaaatttgctgggcgtggtggctcatgcctgtaatcccagcactttgggaggcccaggcaggtggatcgcttgaggctaggcgaaccccccttgtctactaaatatacaaaaattagctggacgtattggtgcatgccagtagttccagctatttgggaggctgaggcaggagaattgcttgaacccgggaagcggaggttgcagtgagccgagatcgtgccactgcactccagcctgggcaacaggaaaagactctgtctctaaaaaaaagaaagaaacagatatgacaaatttatatatatacttgtattgactcaaattaagctaattttagccatagtttgagtttatgattacacaagtgtcttctgccataataaaacttactaacaatgaaagtatttttttgtgattttaggtggcagtgatgcaatcagggaatggaaaaggacaatttctgacaggatttaggttaatgtttattaatatatttgtagttcaagccaggcatggtggctcatgcctgtaatcccaacactttgggaggccgaggtgggagaatcacttgagcccaagagtttaagaccagcctgggcaaaatggcgaaaccccatctctacaaaaaatgaaaaaattaactgagcatcgtggtgcatgcctgtagtcaaagctactcaggaggctgaggtgggaggatctcttgagcggaggttgcagtaagccaagatcgcaccactgcactccagtctgggtggcagagaaagaccctgtctcagaaaaaaaaaaaaaaaaagagagagagagaaaaagaaaaaaaataataatttatttgtagtttaagttctaccatggcattttctatgattgttaaatcaataaaatgttcttttttgttgttcatttwaaaaaattcattttaaaaatttgattgctatctgcatggtgttctggaagtttcatttttatctttaacatagccctatgctgtatgtgaatgtattcctcccagatgaggctagagagaattgatctccttttggtcacactgatgccaccctgggaaagggctcccagacctcctgatgtttaatctaaggctctttccaatcagacagagtcctttctatctgggtagtctctgcctctactgttctctttcttcctcaaacactgctctcttttctcactaatcatgatatgtctatccccagatttgtttttatttacccaatttgtagaggataggagcttagaccatgaaagtcaaacagcctgggtttgggtcctgacttggctacatccagttatgtgaccttggacaaatgggttaacctttctaaatcccagtttcctcaacagtcattgagaataacaagagtacctrcctcataggattataaggattaaattaaatgtgataatacaccacaatacctgcagtttaataaaagtggcagttattctcccgagtttatcatctccctatttccaagtagcagtatgttgccgattcctgaaagtttgggaatttggaagaagaatgtggatgaactttatcttgagaaaacattccatgctgcttatctttcagagatatagcaaagatttatttccacttttatctcatattaataactatgactgggaataataaatgaaattataatctgaccatgttaggtaaatgttatttgcgaaagaagagctatttaatgatatgaaagtcatcacaatcacatggcatatgttaacctttcaaagcatgctgttcaaatgactgttttctttaaattttaatgaagattaggctaactcttaaatgagtcacaattttaaagaaatttttgtactggtattgttaaaacttcttatggaagtttgctagagaaagtagcatgtgttttttatttgtttgtttgaagtagaaagaaatacataggtaatttaattcatttatttaaccacccataacattttctgggggcagtctgtaggtgtgtgtgaaatttcatgggtacggcacacccacatgggcttactcggttgatgaaacacaggcaccctctggtaacacttatatttagaactaaatgatcactggaagaaaaagggattttagttcaggggtccctttccacagcagatgtgagtaaagtttattagcattagattatkattctttctacgagggtttaaaaggtctacataaaaagacaccaataaacatgagaacatactcttatggcacatcaaatatcagaaattatgcattcataatataattgaaatgagcagagtgggttttagtggtacagaacaaaatgttcttaagaattcctttaatgtttcctttctatttattctgcttttccyttagcttcctctcagttaatacagtttacttcatctctctcttagagggagatcacatcctttgaacttaaaaagctgtcagtttatttttctccattaatctatcaatatttacttacaaaggcaataactaaaagctactttcttttcatatcacttgtgaatgcacacacacaaaaggtatttagattatcacctgaataatcactgacaagtaagttgcctaccttatttgatatttgttgtaactgttatatttctgttctgaatgctttatgtctgataactcattcaattctttatatgaatcctagagtgcaagaattattgtgattcccatttgatagatgaagaatctgaaacagagaggctaacatctaataatataatgactagaatctgaacctgtccacatcatctggcctcaatttctatcttcrtgactttgctatgctgcgtctttattgtggagttttaaataaatgtggtttaggtagtattcctctaactggttattacatgttcagttgttttttctacaagtcaagcagagtcttatgctgcatcaccagatgaatagcaagcacttgctggtcagactacaaatttagaatatttcattgtattttggcactgtactttaaagagaaatgttgactaaagagctcacagaggatggtaaccattattataaaaaaggtctgggaatcctgggattgattggcatttcagggcactctttattttaaaaatttggaaaaatgtgacaaatgtatttttaatatttgaggcgttatcatataggagaggctgtagacaggttttgtgttactgcagtgcgcaggacctgtggttgaattcgtggaggaataattcaagctcagtataacagagaactttctaacttgagtcatctgatagaacaggccccttgtgaggtaatagctcttcccattattagaaatctttagtcatctcattccctgtgagctgaaaggggccttcaagaagagagttctcagagcagactcagctttaggtgctgaaatgaatttctcaaggttagatggctaatagcagggcacagctaatatggaattcagggctctcagctcttgatgtttgttgggaataggcaaagaagagtggatttagagactgctgggcactatgctagacactttacatatggaggcccattataccacacagcaagagctaaatgaccatctttctagaatgcagttggggagttctttgcacagtgtgtgcatgtgagagggggtgaggagagatggtggaaactgaaatttccttgcagatgcaaagactgtgtcttctttaccactgaatcctcaaggctaacacagtgcctggcacagagggaaagctaataaatatttgttgaataaatgaagggatatatccttgttggatgaatgaattagtgacatttgtaaactgtagtgggtttttttggacaaaaagtattaggtcatgttttggcttagagaacwgttttctaatccctccctatgatattggtttatatatattatacccataaattcttgcaccctcattgaaatatttatgtaatgacttgactattttataccatgtttacaaacatgattcttgcctttyattaatcattgcagtggtcccacctttgcttacataatttttagatgactgatagcagcaaacctcatattttaacatttatattagttaaaatattttatagcactctaaaatgatgccatattaatgcaatttaagtggttgtgttttttgccttttaaaactgatttaagtacartttagatggctttatactctgaaagctgataatttatgttaagtttaaaattcatattcctttttctatcttagaaattaggggcttttagaaatgaaatatcttatctttgtttctgtgggtgtttcatatttatctttttatttagtgatatagcatcttttccaagactaacccagagaaatagctcttaaggttattattggcttcctcacaccaaagtcttagggcgtaagaaaccattggtccttttgtagctagacgaaaatcttggggtgaagataaggtgtggaagaagaacagaaccggtgtctccaccttcactagtagccttccagaaatctttcaaatgggctttctaaagtaaggcaagacccagtgagcatgtcctcggttcttctgccaactctggagctctgggaacctaggacttgcttgcaaaaccagaccaggggagtcccaggacatagatcagtttcatcaaagggtccgaggtggttaatagacactatcaataggttgggagagggcacttgtcatccaaagagctgtgtcggacttkcagtcagggtgtcatgatcatttgcygtgcctggtgttaccatgttccccttgcccttactgaagatccatgactcggaaaacatagtgctcctgctcagtaaccttcaacctgctgcctctagtactttttctgtcctagtctgttgcacagcagcccactccccatctatctgtccacttccaggactgcccttagaattcattcattcatttatttaacaaatatttatcgaagagttcattatatatagcaggcatttgtgctagattttggatatacagtgctaaataaaaaaaattggccactgagtaccaaatttttaaaaagtttttgcttgaatttaaacaaatttaaaggctatgctgcctgccttcagggataggtccctgtctttaaagtatgtggccttgtgaataggattatttggataccaaaaacgaggaactcgcctcccaactgggactggaaactgtgccatcataggggcccaggttataggaaggaggggacggaattacaatcttcttagaacttgaggcccagaccattcaggattccataaacaaacttctgtgagactagttcatctgctcttctccacaaacatgcccccctcccagtatttctgaggccaaaccctggccactgtgtagaactttttatccctgagtctgaatatccatgttttatgaagctgatttcctaggtggcctttagcctttggcaccttgtggattgccagtggcagactgctgtcacatgaaaagcttggccagttataaccttgtatcatggaggactgaccttcccagtgtgtgtgccatgttgtagctcccagtgcatggccacgtgctgtgcygcctcctggtcttggggctggttataaatctgcagttcactcatgtgttcctatacraggccttttacagactccaaatagatggtcctgagctgatactgtcattgtcaccatgatcctggagacacagcctgtagctgtgtggaagtaaacttctaaaacctgtctcttctgagagttactgcatgaaaacaggcaaggatgggtcaagttttggaccagcagcccaagttccacyaaccactctgttatacagaggcttctaagctatgcagagtgctatgaagggtttattcttcttttgcccacctgactgatatactgatgtactttttgaagaagggcaatggaatttacctagacgtcactgtggtcttgatgtggctgaagtgttttgttgaaggctctttagtcctgtactcatttagattgactctcacttctggtccctttttgtggtgcagactaaagcctcaaactctgtaaaagacaatggcttgtctcatgtaagtatgtggaataggggcctaatacgggaaaataagctactggcagtaaaaaaattttatatttttatttattttttatttttttatttttatttttattatactttaagttttagggtacatgtgcacaacgtgcagattagttacatatgtatacatgtgccatgttggtgtgctgaaccctcctaatgctatccctcccccctcccaccaaccccacaacaggccccagtgcgtgatgttccccttcctgtgtccatgtgttctcattcttcaattcccacctatgagtgagaacatgcagtgtttggttttttgtccctgagatagtttgctgagaatcatggtttccagcttcatccatgtccctacaaaggacatgaactcatcattttttatggctgcatartattccatggtgtatatgtgccacattttcttaatccagtctatcattgttgggcatttgggttggtttcaagtctgctattgtgaatagtgctgcagcaaacatacatgtgcgtgtgtctgtatagcagcatgatttatagtcctttgggtatatacccagtaatgggatggctgggtcaaatggcatttctagttctagattcctgaggaatcaccacactgayttccacaacggttgaactagtttacagtcccaccaacagtgtaaaagtgttcctatatctccacatcctctccagcacctgttgtttcctgccttttaatgatctccattctaactggtgtgagatggtatctcattgtggttttgatttgcatttctctgatggccagtattgatgagcattttttcatgtgtcttttggctgtataaatgtcttcttttgagaagtgtctgttcatatccttcacctactttttgatggggtgtttgtttttttcttgtaagtttgttggagttcattgtagattctggataccctttgtcagatgagtagattgcaaaaattttctcccattctgtaggttgcctgttcactctgatggtagtttcttttgctgtgcagaagctctttagtttaattagatcccatttgtcaattttggcttttgttgccattgcttttggtgttttagacatgaagtccttgcccatgcctatgtcctgaatggtattgcctaggttttcttctagggtttttatggttttaggtctaacatttaagtctttaatccatcttgaattaatttttgtataaggtgtaaggaagggatccagtttcagctttctacatatggctagccagttttcccagcaccatttattaaatagggaatcgtttccccatttcttgttttagtcaggtttgtcaaagatcgaatggttgtagatatgtggcattatttctgagggctctattctgtttcattggtctatatgtctgttttggtaccagtaccaygctgttttggttactgtagccttgtagtatagtttgaagtcaggtagcgtgatgcctccagctttgttcttttggcttgggattgacttggcaatgcrggctcttttttggttccatatgaactttaaagtmgttttttccaattctgtgaagaaagtcattggtagcttgatggggatggcattgaatctataaattaccttgggcagtatggccattttcatgatattgattcttcctacccatgagcatggaatgttcttccatttgtttgtatcctcttttatttcattgagcagtggtttgtagttctccttgaagaggtccttcaygtcccttgtaagttggattcctaggtattttattctttttgaagcaattgtgaatgggagttcactcatgatttggctctctgtttgtctgttattggtgtataagaatgcttgtgatttttgcacattgattttgtatcctgagactttgctgaagttgcctatcaccttaaggagattttgggctgagacgatggggttttctagatatgcaatcatgtcatctacaaaaagggacaatttgacttcctgttttcctaactgaataccgtttatttccttctcctgcctaattgccctggccagaacttccaacactrtgttgaataggagtggtgagagagggcatccctgtcttgtgccagttttcaaagggaatgcttccagtttttgcccattcagtatgatattggctgtgggtttgtcataaatagctcttattactttgagatacatcccatcaatacctaatttttttgagagtttttagcatgaagggttgttgaattttgtcaaaggccttttctgcatstgttgagataatcatatggtttttgttgtcggttctgtttatatgctggattatgtttattgatttgcgtatgttgaaccagccttgcatcccagggatgaagcccacttgatcatggtggataagctttttgatgtgctgctggattcggtttgccagtattttattggggatttttgcattgatgttcatcagggatattggtctaaaattctcttttttttgtcgtgtctctgccaggctttagtatcaggatgatgctgccctcataaaatgagttagggaggattcyttctttttctattgattggaatagtttcagaaggaatagtaccagctcctccttgtacctctggtagaattcagctgtgaatccgtctggtcctggactttttttggttggtaagctattaattattgcctcaatttcagagcctgttattggtctaytcagagattcaacttcttcctggtttcgtcttgggagggtgtatgtgtcgaggaatttatccatttcttctagattttctagtttatttgcgtagaggtgtttatagtattctctgatggtagtttgtatttctgtgggatcagtggtgatatcccctttatcattttktattgkatctatttgattcttctctctttttttctttattagtcttgctagtggtctatcaattttgttgatcttttaaaaaaaccagcttctggattcattgattttttgaagggttttttgtgtctctatttcctttagttctgctctgatcttagttatttctaacatcacaattaaaagaactagagaagcaagagcaaacacattcaaaagctagcagaaggcaagaaataactaaaaaaaattattttaattcccactataaatatctggatattagcaaaagagagtctgatacacagtaaccatctcattgaaacagcagagctctgaagagttttaatatcttgacagttctatcctggctagcatgatggagttctgtttgctgaaattttttatgttccataacctccttgaaagccagaatctttggtgttaactacagtttcttaactatacctgttaagaaataaggtatagtagggaggcatggtgctcaaactctctggaaaatcccagagatgtttgcaaccctatgcctcgtgaacaacccaagcctggtgaagtcctgaatcaccctaagaggcccccagtgatgtgcacgaaaatcttagggtgaaggtaaggggttcagtgggccagacccggtggctcacgcctgtaatcctagcatgttgggaggccgaggtgggtggatcacctgaggcctggagttagagaccagcctggccaacatggtgaaaccccttctctactaaaaatacaaaaatgggcagggcatggtggcgcgtgcctgtaattccagctactcaggaggcagagacaggagaattgcttgaaccctggaggcagagattgagctgagatcgtgccactgcactcttgcttgggtggtagagtgagactgtgtctcaaaaaaaaaaaaaagaaagaaagaaaagaaaggggttccatgtccatcacacgtggtcttattgacaactccagaattgggctttacatcctgtatgaaatgctttaaaaatatgaacacattgttatacctcacagattttggttccattagacagtaaaatcacagtaaccaagtaaaagcccacccttttaaataggatttagtctagcctggccattcctagtgaatccttattaccttcaagtgagaagaaagctcacctagaacagtgttgcagctagcagtgattaaagtgcttgtgccatggcattgattcttgcggtcactaggttgattgtctttaatggatgagagaggattagcaattttgattcccctttgcattttaktcttacgtaaggatttaatttccaacaagaaaatcatgaaattagtttctggcaaaaagagattttctatttactggtttctgccttacacatttttgtggtctcwggatccagtttaagcttcgctgagcccaaatctcaatttatgaaggcaaaagtaggtttgtacttaagagagacaaatgacaatctagtcagcaacagataagggaagtcagaagcaagatcttcctgttgacaacagataggttgagtgttatctagttggagattttattttttagttgtttattttgtcggttgccacaggttgagacttgctggtagcacatctaaggtctttgggacaatcctggaactcagggttgaggtggagggttggccagctgtcaggatgctctcggaaccttctggtaagctgctcccactgagatggaactcaaggcagaagttagtctttgtatcttggaaataaacagattagtagtaagaaactattaaagagagctgacatcttagaaggtgtggctacacaacagccctggcccttgacatcaggacttggtaaggccaagacatcagcgatgtcttccactgatccaaacaccaggcaatgcctagtgatgtagttttttggaatcarttggtagggtttcttgttggtaggggatgctttgacatacttcattaatgctttgtaataatctagcataacactatttagtatgaaatgtctgacagtagttagctactgggggagtaactagcagccacataggcctaatwtttcaagtggcaagagtcacagcattctgtgttatagatctcatgtttgtaagagcagtaggctgagtgtttggcctttgtggtctggtttctgcacaaattttggtcattttatttttcaaaattccgccagtaaagggtgctaataataactaatttttcccaattactcaacaatattattagagctgccccatttgttagaaccgtaatgtgagaaaagctgtcagtacaaagcagttaatccttttccctttggagcctttgtaagagttcagattctggggaggcttttttttttttttttttttttgtacaggtaaagtattcatatgaatatactttagattgcatggacctttttaggaaaatgtaggatcttgtccaccagcaaggacagacgtgactatcctcaaaatgactgtagataaacttctaaaaggcgtttacctgaagtttaacacaatatcaggacacacactttataggacagagtgtaaagaaaggttttcaagtctttagattcatcagtgccttcactactatcattatctggaatcagcaggcgtactgaagtgtgccatttatgtgtacaaagacatgtatacaaggatatgattgcacattgtaatagcaaaagattggaaacaacccaaatgcacaagttagagacccgttggagtagattgtgaaatatatcatgcaatggaatgttatgcagccattaaaaagatgaatgagttctgtctgtaacaatacataccaaacttcaagttttattcagtaggaaaagccagatgggaaacagtgtgaattgtaagatgttactctgtgtgtgtttgtgtgtgtgcacacatgcatgcatttaaacctcaacagagcatatagttgttgtatatggatagaatatccctggagagaaatacaagaagataaatagttgccttcagtaaaggaagtcagtagctgggggcaggcttaggagggatatgtgcttttcattctaaatacattttgaattttgtatcataaatgtttattgcctattcagaattttaaaaaatgctacatgggacccaccttctggaatgcatttgataggagtgatggattcagcaggaagaccaccttagacactgtcaggatgttcagggaaaccaggataaggacatagattagcttgtctgcactgggaaggaaggaagggctagatgagagactttgtgcacaaggactggagagctgtgtggccgaagggaggggagaaggagaggaggaagtgaatgtggagttactgatttggggaggattggtatataaatgatgcctttaattaagagttgaaaatgggaataaaagcaggttggtagtgggggttgtgaaaagaagacttcaggtccagacatggtgaatttgaagtgatgtgagataccctggtgatgtcttgcagtcaattcagagaacagctttaaacactattaaaatggcttaaagtacttttttgstatcattttcatagttcttttgaagtttttagcatactcaaatatcttttccattccttaagtatgattatggtgtaatggaaaatttaggwtttaaaaatattttagttttgtggtgaccaatacaaaacaagataattattttgttttgaaatttcccattacatatgtgtcttgtacaaagccatttaccgttataaactaaaagagcttgtgccaagggaatgagactaatggattgttccaatctctggtacagtcggaaaatattaaatgaatggtaaaacatttaatgtgtccattaactaatactgctaatttacagtgggagtgtgtgtgaaagcctacataaataatttctgaagtcactgtgatccctgtaattacaattaatactgaaaaaacttctcaatttcccatgtgcgttgtaatagttccaaaacaatgccctgtgttaatatatatcttgtaaatattttgttctcggaaggtgcctggcttacatagacttgcctatgtgagtgaatgaagtcattattactattattattactagccagcactttcrcatttcctttcttgctcaccatttaaaaatgcatagtaaggtataaggctgagatgcaactgtgcagcagccctcaatattgttcttaaggggagaaaaagtgagcagcacgtgcagtcttttctgcctgtcctttcaggataatgtcagtaaattctttgccaatccttcattctctcgtagatggctagggaggaaggcagatatagtttcaaatcttacctacacatcgtgaccttggacaagttgcaaacctttctaagccttagggtcctcccagcaaaggactgcttgccactctttgaattatgtggatgaaatgagatgatatacctggcctgttataattactccataaatggtaaatcttagtattttggacttgtgaaatgatttcaactccaaacatgaataatggagtcatctaaaccctccctcacggtcactcctcacaatgagttagcaagtcccatgaattctacctcctaaaaatctatggaatccttttttatctctgtcagctgctgaaatcttcatggagtgctcctatgcacagcagcctcactgcacccctaactcatgccctgccatgcctttcctgccatttaataagagtctcccaccacggctttccactaccaagtggaccatctacactgctgccctgccagttatcttcctaaaatgagtatctggtttgtgtctcttcctggcttaaacccctttagtaaccgtgctctgtcacttttaggatcaaatctgtactctttggtgtggttaaaaggttcctcataattgcccctctgcttttattttcyatttgcagcccatggttgtcacatcacgctgtttataatgcccagcccctgcctgatctctcttcttcaatgtgctcatgtgtcccttggcttacagtatccatgccttctccttctccctccttgtggcttcttccccgccgacatacacaggaaaccttacttggccttcccacccacaaccccgcccgccccttcttttttttttttttttttttgagacaagtctcactcttggctgggctggaatgcagtggcgtgatcatagctcactgtagcctcaatctcctgggctcaggtgatcctcctgctcyggctttcccaggcatatgccaccatgctaggctaatttttgagtttttgtagagatggggccttgtgatattgcccaggctggtctcaaacttctggcctcaagtagtcttcccacgttggcctcctaaattgatgggattacagacatgaggcatcgctcctgacctcttcctcccttcttatttgagtatcttcttccccgacaaagcattctcagatcctctagtcttggttagtttccccttcactgtgttctcattgcaycccagatgttgaaagcataaatacagttcagatcacgaagggtcttgtaagccatgccaagtggtttagaagatgacaggaacctactccactgaaattagtttcacttatctgtgtttccccattggactgtgagctctctgagtgaaaggactgggtatttcatttctgtttcctggaggctgcaacattgtttggcagaaaataggaatactttgtattttctaatgaatgaacggatggattcaaatggagagtgtaagttttaaactatcacaataggtgaccttctgcactttgctcacaaccttatagcttatctaacccttcacctttgcccatcactgaaaacattaacatactctgttgttggattgtcttttagaataaagtcacaaaacagacatgaagtgggtgcagcaaatcaaatgttaatatgtaagtggagaaaagtgctataaagataagaatagcatgtcgtgatggagaataaaaggggagaccttagataaacttataagggaaaaccagaaaactcttatttttcaaacacttgtttattgaactcacaaggagctcacaaacttggagacactaggcaaactacatagaattatgctgcagatttgtgtggcttgcgtgtcagttttgagttcttttatttaccttgtaaaatatgcttgctttatattggcagtgtagtattaattgactttagtctgttcttagagtactaagtactttttagatttttaaaaccaattttagtaataagacatagctatgtattatatagtgaaatgaaattatgcttaattattttaaaaattatgataggaaaaataattttgttattggtaatctgaaactttctttccatatcttaacctttttatttctgttgaacagttgttttttatgacctttgaaatcttagagttccatataacaaaatatggcaaaatggattgtgccctagacagggttccatggactacgtggaggagcctgagaaataggcactatttgtctagtataacaggagaaagaggttgtgatttaaagctgaaagacctgactacatcttctgcctgcgtgacttaccaagtttgcaattttaaaaaagttacatttctttttacctcttatatacaccagttacatggaagattaaatgagatggtgaatatgatcatattgatagcaaagcactttgaaaatgtaagatgctgcggaagtaatccttctgtttatttatcaaaatcagagccccattaagtgtcctgtgtttaatgagcttaattattagttcttttggttgtttgtaaccatagatattaattgatattattgaaattacgaatataagagaatagatttcaggtattattgatttaccagtttattacaatatcaaaatttgtaattattttttttatgggtgtggtaggctgaataatggacccccaaagatgttcacatcctaatccctggaacttacagaatgagtggcacgttacctggcaaaagaaactttgtaattgtgatcatgtgatcttcatatgagatgatcctggattatctaggtgggcccagtgcaataagagggaagcaagaggaatcagagagtcagagaaggtgtgactatgaaggcaagaggttggagagatgcaaggaaggggctgcaagcggaggaaggtaggcagaccctggaagctgagaagggcaaagacatggattctcctctagagtcgagagtctctggaaggaatggagccctcccaacatctttattttattttattcatttttaaaaatagatttagagggtacaggagcagctttattacatggatatattgcatagtggtgaagtctggatttttagtgtaaccatcacctgaatagtgcacattgtgcaaattaagtaatttatcatcagtcacctcccttccaccctttagagtctccagtgtccattattccacactatgtccatgtgtacacattatttaactcccacgtataagtgagracatgtggtacttctgcttctgagttatttcgctgaagattaatggcttctagttccatccattattctgcagaagacatgattttattcttttttgtgactgagtagtattccatggtgtgtgtgtgtgtgtgtgtgtgtgtgtatacacatgtatatatatacacgtgtatatatatatatacacgtgtatatatgtagtttcacttatatgtatacacacacacacacacacacacacacacacacacaccccatggaaaactactcagtcataaaaaagaataaaatatatatatatcacattttctttatgcaatcatctgttgatggatactggatacttaggttgattccatatctttgctattgttaatagtgttgtaataaacatataagtgcagktatctttttaatataatgatttctttkcctgtaggtagatacccagtggtgagattgctgtgtcaaatggtagtacaatttttagttctttgagaaatctctatactgttttccatagatgttgtactaatttacattcacaccaacagtgtacaagcattccctttgctccacattcttgctaatacctgttgttttttgactttttaatgactrctctaagatggtgtctcattgtggttttagtttgcatttctcatgatgagtgatgttgagcattttttttgtatgtttcttggccgtttgtatgtcttttgaaaaatgtctgttcctgtcctttgcccactttttaatggggctatttgttgttgtcattttgttcaacatcttgattttaaacttctgaaatctacaactttaagagagtacatttgtgttgttttaagccactaaaattgtgataatttgttacaatggcaataggaaactagtacaatgtggattgactaaacattaataactataatttgtttgaattctaagaaattaaattctagctttgtccaatagtcttcaaaaraaatggtggtgaaattgaattctagctttgaccaatagtcttcaaaagaaatgggggtttattattgaacatatgattatatatgtgtatatatatatatacatacacacacatatatatacatacacatgtatacacacacatacacacacaaacatatatatattatatatatatataaatcacataataagataccccaacaagtaacacatgaagcctttcttggtgattcctcaaggccaagtcctttgtcatgtccttttcccatggaaggcagggcaggagggcacagctgcacagggacctctttattcttgatggtttcactatcaccttctatttttgatgctctggtgaaccagagacttctgtgaagtaacagttagaaccatgattctgaaatacaggcttaaagacattaagaggggacagttccctggactcctccgcgggacctgtgacaggggtgggaggggtggcttgtttcgytgggccgagttcaaacccattgtgggagggggagcacatgggccagcaggtcctggggcaggtgtgagtgcttttgggctccagccccacggtagcatctgggggtgtgttacaattaatgctcttttagcagttgctgtccgtggacaaatctaatcagtagatttcttaatcacaaggcctataaatcaaaataattttccagttttttttgcctctggaaaacgtaactgtattaagtgtgttatgatctttccttgctcattactgttcactttaaaacaagtttttattgaaaaggagaaattgcaaatgtatacattttactttagtagtatataagtacacatggtttattttgctgaaatcatttagaattgaggcatttgtgtaattccaaatacacaaagaaaaattagaagctattctttatccttctttctcccctttttcttgaattcacaatgactttacaagacatttaatgtaaaggcactaaagacagttaaaaccattagtcatcatgctttacttagaattcagcaaagaacaaagttaaagaacaaaatagcaagcctggtttatttgtctgaataatgcttgtctcatgatactttatctcatataagggaaggagaggaaatccttagttacatcatataaggtagcaaaaaataaatacaataaatgctagagacaatatttattcagaaaacatcagtgagtccagtgaaacttggagactctgaaatgctgtgccagtcattagagccaggagtgtattatgatttaatggtacctctctgctgcatctcatgagctgtcctagaaaaacattttgaagcaataaagcatccatttggctcctaagtaatgagaggcattgttctttgcattaactatttattcaggaagagaagtgaccaactgttaataagctttatccaaagagggtcgtggaaaacaagaaaatgcaaaagtgaggttctcttcaatttcatatgcaattaacaaatatccagagctgactgattggtgctcctcttccatgtgacttttggctggctgtatttaagggtgagtgcctgttagatgtattcaaagcttctgggtttaaggaaggattctgtagcctaaacccatgacaaatgagaggcggcaatgactcgtgagtagctaagactggattgatctctgttgttttgaatattggacttattttctaagatgaatagtaatgatttaggcttactagtttattccttttgggaaggattctttttgtttgtttgttttagaagattattgctttttcattacttgtgaaatctgctctataatccaatgtaatgtttagacttatcacttgatcaagaagcttttaacttgagaaaaattcttatttggtatataaataggtatgtgctttattctttggaaatagtttccaggtaggaatgcaacatttttctcttgttctgcaagtaaataaatgatctcttcttgacagtaaatgtgtaggatttagtaactttgagattccaaccagaatattgtattcacaaataaataggggcttctttcaagtcatttcagaaccttactttgaagcactttgatcctatgagagtgtgaagttttcattccacttgctttaaggtccttaatataattaagttgcctttttaataacatgagaaaagataaaagtcgcaattctttccttccctaaagccaacaaaaggatgtttatggtaattctttgtccctgctctcgctaaatactagtacagtggagttctacacagtgggggaagaatcttcataaatcattaaaatagacagtggaagtgatatgtaaactcaatattatttaaatattaacagaatattcttgataccataataaatcaattaggtggccgggcgcagtggctcacggctgtaatcccagcactttgggaggccgaggggggcggatcacgaggtcaagagatccagaccatcctggccaacatggtgaaaccctgcctctactaaaaaaaaaaaaaattaagaaatcatttaatattgcattcctttgatttttaatttaaaaatattttccatattgaaaactatgtattcctgctaagcttactatgaattattttgaagtatatttaaaatcagtttgtaagatgtatttcgtggaataagaatgcattgtgtatttgggtccatagccttagaaaaaagggctaaagagcccaagtcagtagcaaaaggatcaaaggtagaaaaactccttaggctttttctttcctagaccacattattttatcatacagattacaaaaacgtaagaaataaagactcaagttagaaatggaattacctcagaagatgttaggttttgcaacaatctttctctttgggtattaacaatcattagattgaattatccctttcagatcatcactccattyagaaggctaatgctgtgtgctgagaacagaaaggagatggaggattggatcagctcactgaagtctgtacagaccagagaaccctacgaggtaaaatagcatcttttctttcatctcgtgttcttaggaaataaatgttaaccaaagggctagagctctaccgtgcaaacataagtatgtgtacactcattcagcaacttgtttaaaccagattttgaaattcttatcttaaagcaaagtgctttggttttaaaaatgatggatttgaaaatttgaccataactatatgcattccaaacagttcagcatctgtagccttgttcactggcttggcaaatctgtcctcacatctcatttctaggtggcccagtttaatgtggaacatttctcagggatgcacaactggtacgcctgctcccacgcccgacccaccttctgtaacgtgtgcagagagagtctttctggagtcacctcccatggcctgtcctgcgaaggtactgtagcacctagcatgtgttttctcccaacagtaaccatactgtagacatgctgccactggttttattgtagcttaaaattgagctctccacacataggactagcttggaaaatatttttgctcaggaaaaaaaaacatagtcatttaaaggaaacatacatcaaaatacagcatttcacccccaagaaactaggaactactgtctaaaaaaaaaaatctttggactttgtataatcattctggtattctttattctggttgattatggagagcaaaactttttgtgaggacagtatatactctttggcagaatttctgattgttaattatattgcattgttttaaatattgttttctttcatttcatttgtttaatctgaataggtatcatcctttttaatttccttaaaattttctaaaaataaggcctatgctgttgttactttgttttgtttcgagaaggggtctcactctgtcacccatcctggaatgcagtggcatgatcaagtctccctgcagcctcagcctcctgggctcaaacgatcctcctacctcagtctccctagtagctgggactacagtcaagcaccaccacacctggctaatcttttttttttaagttttttaagtctcactatgttgcccaggctggtctcaaactcctgggctcaagcaatcctcccacattggcctcccaaagaggcatgagcaaatttgtgagttatttttaatataagagcagtgaccaccaaaagcaaatacattaataattgccaacagaaaactcataacttctttagatttattttatttcatacttcagtgattacactgttgtatactactttttgaactatatatgataataataataccagctttttttctctaatccaaaaatttcgtaatttggaatatcacttatttataattaagtaataaagtagtaatagaatcacagccttaattgattttaaactataaaatctgtgatatgtcattgtttcaactatttaatatgatacaccatagtggttaagaatagagctcttcagtcaaaccctcttccacttccaccattacaaactataaccaggagaagttgtttaactcacttaggctttcctctcctcatcgataagatggggataatagtcatttatgcctcatagaatcactataaaaattaaatgagggaatacatacaataaaactacttttctagttcaataaattggaagaagtttgtaactgttttgtaagaaacttattccaaatttgcatcatgggcttgatgcattaaaattcatgaaggagaaaatttggagaaggcattaaagctttctttttagacttaaagaatgattgcaaaagagatctgattggcctgtattatgactttagtaatctaaaaggattcacatagagctgaataactcctaccaggtctgtaatatggtattattttaaagattttactaaaatctttattccaaaaatgctgaaaagacaccacatctgagacactctgtggtacccttctgatttgagtgttatacattattaaatatttttatttaaaaattgagtcagtagtggaatgactgagtatttttctaagcattttaaaagaaaaatgaaaattacattatttggtgagaataagaaacttaaaagtctttaaataaatttgttatattcggccgggcacggtggctcacgcctgtaatcccagcacttcgggaggccaaggcaggcggatcaccgaggttgggagttgtaagccaccacgcccagcctcaagtgaagtattattttctatatgaagtctgtgttctagttacacactcatttataacaaaaatggtggaagggaaagaatttttcaaagtacacaaaagagaaggtaagcaaaacattttcagtgtgtatacattattatcattattattattgttattattttttgagacagagtgttgctgtgtctcccaggctggagtgcagtggcatgatcttggctcattgcaacctctgccttcctgggctcaagcaattcttatgtctcataagaatcccgagtagctgggattacaggcatgcgccatcacacccggctaatttttttatttttagtagagacaaggtttcacctttgtgaccaggctggtctcaaactcctgacctcaggtgatccaccacctcagcgtcccagagtgctgggattacaggcgtgagccactgtgcctggcctagacgaatatttttcaaggataaaccagctcagtttaaccatccatttgtacatagactagtcatgatacctgaagcactttgaacatttggctaaagacatcttagttattttacctgaaacttttgttttcgtgttatatccaattaagacagtttcaagagaatggtgtgtaatgcaaaatttgttaatgattgacttagaaatccagaaaaatcacatgaaaaggagatacctttcatttaaatttagcaacacttaccttagtatgtttccactgaaatgctctctacttttaactgtttagctaaaagtcaggagctgacctaatatcagtatcccctcatacttgaataatttccttagagagataaacatgtttaataatagtcaagttccaatttttgtaagtatggtcaatttttcaaataacctatagttcatttgtttttccatatatgtgctgctttttttccctagttatttcctccaatttctcttttataagttccttttgataatatggctggggagatttagtgaagcctgtagtgacaacatcacttcatcatcccttctttctacatttgtcatttggtcatctcaacayaatactttccaaagatagggccgtgttggtcaccctcaccaacctattttccatgatgcctggctgtcttgttggtatacttgcactttacagccccctggatcaactttatcgtactgacattttcagacttataatcagtattttatatgtatagaaaaatacaataccagaaatgtacagcttgatgaattttcacaaattaaacacattcgtataatcagcacctacatttaaaatgggatgtcaccagcagacctgctaccaaattttatttgcttccctctctccctctctcctatgtgtgtgttgtctgccttctcaagcagtaattcttttgcatttatttcttttctgttcctctaagtagcagtctacttatagctttataaaagtgcttcataaatacatagccgtatttgttttctagaataccattactattgttgcagaataatttaatcttttaaatatatttgttttcttctacttcctccttcccttttaaaattttatgctgtgrtttcctttaatcattggtccaaaatttcttgtccacttaaaagcagttgctcttttttttttttttttttttttttttttagtgkgtaaattcaaggctcacaaaagatgtgcagtgagagcaacaaataactgtaaatggactaccctggcctccatcgggaaggacattatagaagatgaagatggcgtaagctgctgctctgtctctgctctcttcccactaactcctcttttatgttctgctcttgtggaagctgagaaagataagtaggaatgcttattattaggatttaatagaaggtttggttgattctgagtttttatttttaattcaatccttcatagcttctttagctcttagattttgaaggaaatctgttgtgaatagggcttagaagtggccgttgtgctgggctgttgttgtcgacctctgatgaactctgagatgttctttaaggcttagctgagaggttcactcttcagacattggggttgcctctcaacagtatacctccactttcaaaacctcacctccactgcaccatgcatatggatttctgggaacgcttagtgatcactttattgtaatccctttacatgcctcagctaaatctacctgaaccctgaagggaaaagcttttaccttacttttataktccttgaacgttcataatagatgctcaataaacgtggggtaaatgagtgaatgctatgcatgaaacgtactactgaccctctagagtgagaaatgattcaaaatctcccctggggtaaggttggtgtccgccagtcttcacctggctgcccyttcttccttctccacaggtcgcgatgcctcaccagtggcttgagggcaacctgcctgtaagtgccaagtgtgctgtctgcgacaaaacatgtggcagtgttctccgtctacaggattggaaatgcctttggtgtaagacaatggtgagggttttggaatcagttcatcctttttaattagcttctttccctaactttgtcatccacgtggtttagaggcaaagcaaagaatttatgacagagctgaacctggtagcatasgcatctcatgatgacattcttctttccttacagtatagtcctcctagtctggtcattgtttcaaatgccctgtaaaacttattcttgttcatccgtgtcctgtgcctcaggatctcttacycatagttgtattgttttttcattttgctttatcaacaaagtgatttgctgtattcgggcctattttactacctgaaagcccttctctggtatgtcaccaaattttggttgacatgtgacatgtaaatttgctacaaccctaccagtgctctctgacagaggtgaacagcacatgcagccgaacatgaagccaacagctgattatttatgccagatatggtgaggacagggcctctggactgtgtgaagacagtcagagtaggaaggagatcatgtagacagtggcatgggactgaaaaactgcaggatgaggaggtcgtgggtgtgagcrttcatctcagcactgggcgatgctgctctacaatgatagtgattgccttgcacyggggctgacttatttggtggttttgagtcttgtcttttaacattgctggctgaaatttggaagccagcctcaaattttaaaatatggaaaaactattgtttttggtatgtatggtgtagatcagcaaatgtaagagatgtgtgatgtattgctttcctaatcaatgagattgtctgataggctacaaaggaaaataagtcctacaactttttagttaggcctgataggtaaatctgtgtttcttttctttgtcctcatgcttttgttattcttcattgattgcctcttttactagccttagatatgttactaatactttttctcttatctcatttaatctaatatatagactgtaacaggtgtctctctttacaatcttagtgcaagcctagcccctaaaaccttgtcatgccatttttttattttaaaggaattctacccataaacaagattttaaatcatcattccacctcagatttctttttgagaggacaaccactgataacraattttcctgctatttttattggcctgtacatttactaaagtcgatttctctacttctagagcttcaactgttcacttccaatgtattagaaagaaaacacggccgggcgcggtggctcacacctgtaatcccagcactttgggaggccaaggtgggcggatcatggggtcaggagatcaagaccatcctggctaacacagtgaaaccccatctctactaaaaatacaaaaattagctgggcgtggtggtgggcgcctgtaatcccagcactttgggaggccaaggtgggcggatcatggggtcaggagatcaagaccatcctggctaacacagtgaaaccccatctctactaaaaatacaaaaattagctgggcgtggtggtgggcgcctgtaatcccagctactcgggaggctgaggcaggagaattgcttgaacccaggaggcggaggttgcagtgagctgagatcgygccactgcactccagcctgggtgacagagcaagactctgcctctcaaaaaaaaaaaaagaaaagaaaagaaaaagaaaacacataatgtgtgatgaattattttagaaaggttttatgtaaatttttttccctgcaatttktatatctttactttaaaaaaaaatcagtagtttttaaactctgttaactttaacagcaggagttaattaggtttattacttgctcattctattcacccctaacttttaaacatttcttaactagaatagcagtggtattacagatggtagaagggaggatgccttttctctcttttttcgtggcaaactcaaatttcaccttgtgacatcattcctgccccaccctatgtaagttggacttgctggtttctgagctaccatcaccttatagcacctctcttagtcttgcacttcctatacacaaccatttgcctgtttacatattattttgcctttaaaacatgagtttctggcctggtgcagtggctcatgcctgtaatcccagcaccttgagaggccaaggcatgtgaatcacctgaggtcaggagttcgagaccagcttgaccaacatggtggaaccccatctgtactaaaaatacaaaaaaattagctgggcacggtagtgcatacctgtaatcccagctacttgggatgctgaggcaggagaatcgcttgaacctgggagttggaggttgcagtgagctgagattgcaccattccactccagcctgggcaacaagagcaaaacatcatctcaaaaaataaaaaataaaaaaacatgaacacctgtaattccagcactttgggaggccaaggcgggtggatcatctgaggtcagaagttcaagaccagcytggctaacatggtgaaaccccgtttttactaaaaatacaaaaattagccaggagcagtggcaggtacctgtaatcccagccacttgggaggctgaggcagtagagttgcttgaaccctggaggtggaggttgcagtgagctgagattgcgccattgcactccagcttgggcaacaagagtgaaactccatgtcaaaacacaaacaaaaacatgagtttcttttttttttttttattttgcgtatgtctttttttttaattattaytatacttttagttttagggtacatgtgcacaatgtgcaggttagttacataggtatacatgtgccatgctagtgtgctgcacccattractcatcatttagcattaggtatatctcctaatgctatccctcccccctcccccaaccccacaacagtccccagagtgtgatgttccccttcctgtgtccacgtgttctcattgttcaattcccatctatgagtgagaacatgcggtgtttggttttttgtccttgckatagtttactgagaatgatgatttccaatttcatccatgtccctacaaaggacatgaactcatcattttttatggctgcatagtattccatggygtatatgtgccacattttcttaatccagtctatcattgttggacatttgggttggttccaagtctttgcttttgtgaatagtgccgcaataaacatacgtgtgcatgtgtctttatagcagcatgatttatagtctttgggtatatacccagtaatgggatggctgggtcaaatggtatttctagttctagatccctgaggaatcgccacactgacttccacaatggttgaaccaggttacagtcccaccaacagtgtaaaagtgttcctatttctccacatcctctccagcacctgttgtttcctgactttttaatgattgccattctaacgggtgtgagatggtatctcattgtggttttgatctgcatttctctgatggccagtgatagtgagcattttttcatgtgtcttttggctgcataaatgtcttcttttgagaagtgtctgttcatatcctttgcccactttttgatggggttgtttgtttttttcttgtaaatttgtttgagttcattgtagattctggatattagccctttgtcagatgagtaggttgcgaaaattttctcccattttgtaggttgcctgttcactctgatggtagtttcttttgctgtgcagaagctctttagtttaattagatcccatttgtcaattttggcttttgttgccactgcttttggtgtttcagacatgaagtccttgcccatgcctatgtcctgaatggtaatgcctaggttttcttctagggtttttatggttttaggtctaaagtttaagtctttaatccatcttgaattgatttttgtataaggtgtaaggaagggatccagtttcagctttatgagtttctaacagcaggatatctagtgcctaaaacataatctatgtagtgaaaaaagaaaacaaacaaaataaaaaagcccatagccctataaacctaatgaatcaacttataatttttcctactgtcatccaggtctgtggacatagttttwccttttctgtaaaaattgtgaagatataatttgatcatctgcttttcttatttagcrttattataaatacctttctgttttgctccatggttcttatacattttaaaattacttttaaagctatctgtgtgtgctagtttttctaaaatgcatttggattgttaattattgtaaagcataatagaaaactgtctaaaaacaggtcttcaccagaattagaattattattgaattttagttattctcccaaaggttttgataaatacaggtttaattatgccagttttctaaaaggactaataaaataaagtcatattaaataagaacttgatgaaaagtgtctgcttttactggttaaaacatttagaaggctctccagacaagtacacaaactaaattgcctgggtcctacttaataagttatccttgtttttgttctcagtagtaccttgcatgaccatgaaactcatttctactgaaagcacatttactgggtgcctgtgatacgcatcactttcctttaccttacagggcagcagtccagctgagaaaataagcatgggggtacttgtaactttaataatagggaaatgtcataaaagaaatgtgaatagaaagytatgggattactgcagaaaaagcaggcactttatagattttatctttgttaaattttataagaatttttataagaacaaaataaatgttctgtcatcaatttattttatgggcaatgatattgacacactggttagtttccgtccttcttcttccttttccccttctttttctcttctctgcctcccttcctctgcacttggtctcttctctttctctctcttcgccttcaacagttattcattaactatrtattcctctctgagataattacaaaaattggttgcatggactaaaatcaaatttccatttctaaaatgtttagtcatttcctgaagtataaatgttataccatttaaagtagtttatgaattactgaacattttgtggtacagttgattctagattatcagttccttagatgtgatttataatggcagaacattatttttatgattcttgaaggtatatttgtttgtcattaggtacacactgcctgcaaagatttataccatccaatatgtccacttggtcaatgtaaagtatctatcatacctccaattgcactaaacagcaccgattccgatggtatgtagcagtagtgtaagtacgtatatttctggtatatttaacattgatatgtatatttcttttcctagaataataactatgatggtaattgactattgtagtcagtttttctaaaataattccatttaaattgctgaaagtacattccatttttaaaagaatatatttaagtgaaagttgtagaatagctgttaacattggcraaattactgtatataagacttctagattttatgttttagtaaataaaacargatcattactctgtacggcaatacartctgaaaaggttaatttttataagtgtttttttcctctataattgaaactgcctattagcatggctgttattaaaatctgtttttctgtaatttcattgtaggaatttatattcctataaatgcacttttcccaaaatcttacaacttaactctaaagtgctgaggaacccctctacaacaccggttttgggattgcatactaattacttccttctaagcaaaccgtattgcaaaggctttttaccatgtataatgctatgctgttttatgtaacagacttgagcaactgtggattttgatattcatagggttcctgcagccaattcccccaaaatatacagggaggactgtactattattaatgtcttgcattgatatcatgccttatgcttttcaaactttttaatttatgccaatagatatcttagatataagtttataaacctgaagatgtaagtttataaacctcaaaatrtgtgacttttttaaaaacctgtgctattaacagccctctcccccaacctaagccctgattttgtttactataaattttaaaatattctctcagacttcagaaaagagcagttaaaatactttgaaatattgaatatgaacataagaattacatacaaacatataggtttgtatgtaaatagttaayctatctctatttggagagctaaattataacttaatgctccagtttttatgaatttattttcttttctctgaatgtttgctaataatttaaaagagaaagctgtatgtattgatcttgtgttgtgtttttttcacaggtttctgtagagcaacattttcgttctgtgttagtcctctattggtttttgtcaattctaagagtggagataatcagggagtaaagttcctccgtcgctttaaacagttgctaaatccggctcaggtgtttgatttaatgaatggaggtcctcatttagggtaactgattattgataaatcttatttgaatacaatgtaggaytaggtgttaaatgtgtttggtttttcagctcatgaaaattacagattcctctagwtccctccctcgtttttaaagctctrattataagttttaacacaaccttttggatagttatacaactgtcttgtataaattcctaatttctcaattccaaaatttgtttagaaaatgttttagaatatattctacatcaaacaatactaacaatttctttagctccaagaaagatcaacttgcgtaaatatagaaatataaagtaatattagaaaatgatttgcatggaaggctgatattgatttacatacaatataaataatcgattattaaaccaaagtacagggactctcatggctgtcaagggcagttcttcaaggatctcagactcagttcacataaatgacaaagaaatactttattgatgattcttttcagctttctggatgtcatataacttaaaatctgtaagataaaatgaactaagtggtattttcactgagggaaaatataccttttggcactttcaatacatttttagggtatgcatatgatttttcttaagaggcgatattatgtcttctgaaccaggggccttcaaacctctatgtaacatacttacagcaactcagcttttctcttgggttccaccattaccttaaagcatgaacacggaagtagaagtggggatttttgataccagtgcctgaaaaggcattttgtgtttcgtaatgtgatactttcctctgtcttctctatttctctcctttcttctctcttggtgcctctgttcacttttgccccctgagtcttccttcctgcttccattgcctttatcttgctaagtctcaggcccttctggtcacatggatgttggtcttcttcatttatacccagcttcctccttatctacgtgtactgcccttcctttcctctgctgaggtcctagagtttcctcatctagcctctcttctcaccttctttgtctctgccatgctagggtagttttgtccccctttctaacaygtccattttataatcctttatagttccattatcttatagtcttgatttattttcccatttgtcctcgaaggcttcaaggacctctcttgatgaaacttcctgagattgtccctctaatatttttcagattttccataatacttgaagtaagtgtacaagggtacatttaggagacgggatgtgtcaaaagttgagatgagggaaaatagaaggatgggcctgagaataggagaagaggaggagaaaaagccagttgggagtcctgagagcaatacaatgattggtgtctttaggaactgcctgagcgtcactcattagcatcagcaccctagattccttacccatggtttgtaattcttaaggaaagaatttattcttgtaatagaaagagaagaaccactacttccaccatcttgtattactttacctttcccggtttctgctgcttttttgttttctcatttctcacccccattcctcctaattttatcttcatttctacttatcattccctttcctccttatgattcagaagttttcttgagttaaaattacacttcagtgaatgtttatggtataattaacatgtaagtaggagttcttatatttaatctgaatatgaatactgatacagaataacaaagaattgaggaaagtgatttttatttctttatactaaaataaaatcctttttgctttcagtttaagattatttcagaagtttgacaatttccggattcttgtttgtggaggcgatggaagtgtaggttgggttttgtcagaaatcgataagctcaacttgaataaacaggcaagtgctaattcttttacttgctagttaacatgaatgcatactaacatacttaccagagaggtgcagaaatgcagtagtccctatttctcaacttgtctgaaagtcaccctgttgcactgtctttcagtgtcagctgggagtgttgcctttgggtacaggaaatgaccttgcccgagttcttggctggggaggttcatatgacgatgacacccaacttcctcagatcctagagaaactggaacgagccagtaccaaaatgttggacaggtaaaagtaaawtcttttctacaactagatggaaaatggcatactgaaatcatttttttgatgatttcttaataaatatttattaataaattttactgactagaagctccacgaaggcagagccttcctgatcttgtccactggttaatccctgagatggagaacagggcctatcacagagaagacactcaataaagatgttttatagtgaatgaatgaattataaaaaactagtctgaggaactcattattttaaatacagaaggctatgttactactatttacttttaattgcagttcaggtcagaaaacraaaatagttcattttgtggggggccttttgatgagtatggtaggtagtctcctgtcattgtatggtttccaaaaagctaaagaggacatataaacgttagatttgttagaatatctcctcttaaatatacatattaagaatgcattgatccaataagaactagatatgttaaaatataagcagtcctttcccaggggcaggaaaatattaggaagacagcttcaaatgaagggactatcattgtgtttatgctgttcttgatcacatctcttaattgctttctctctgaatgtccgtgtataaaaaagaagctacaatgtgtgtaccctgcgtgttatggaggaagtgtttaaaatttgggtataaggaacaacaggactcagtaaccagccactccccaacccccaatgtcagtagaagacagatgtcaaaatatcatgatcaacttgaggtagcataaatcaaaacaattttgatagaattagccatctgtggaactcttcccgaaaataacaaaatttcaccagggagccaccaatctgaaatgtaattactctaagatgggctataacctaattaattgtaaccttgcctgtcataaggtaaaatattttgctgacagaatatttaaaaagagagctgggaaatagaacatttgtctctgttcatccaaaattacatgagagagatactccagtagcttgggtgcataaaagtttataatcttatgtgctactgggttcagcctccatcctttaaaataatctggaggttaaaagaaraaaaggaatgaaaaagagaaatggtacctatggatatgttagttagcttgattrtgttgtatatatatccaaacatcaagttgtacaccttaaatatatacaattttttatttgtcaattatacctaactggggaaaaaagattggaaataaataaataaaatcaccattatttgtaaatgagcctggaggtgacttcccagacaactgtccaattctgtggttaccaaacaaaaggggttatttaaatgctgtctttgttgcaaatgtaaagaccacttcccctgctgttaggcatttcatctaccctgggtatgtgctttcccctcgtgtgctatagaaattcacttctcagtcgggggaggtggctcacgcctataatcccaacactttggaaggccgatgtgggaggatcacttgagcccaggaggtggaggtggcagtgagccacaattgcaccactgccctacaatctgggcgacagagtgagaccctgtctcaaaaaaaattaaaaataaataaataaatgaataaaaagtcacttctccaggtggttagccaagaaacagcacccccatggtgaaattccttgaataccaactgatatgcaaaatcaaaacaaaacaaaagaaaatacacacacacaaaaatcaaagtggattcagaaacttaagatctttgttagaaacataggaatattttattcctatgtttcctttattaatttactgtttgtaaagaacaagtgggttggttgcagtggctcacgcctgtaatcccagcactttgggaggcccaggtgggcgaattacctgaggtcaggagttcgagaccagcctggccaacacggtgaaaccccgtctctactaaaaatacaaaaattaactgggcatggtggtgggcacctgtaatcccagctactcgggaggctgaggcaggagaatcgcttgaacccgggaggcggaggttgcagtgagccaagatcatgccaatgcactgaagcctggccaacagagcgagactctgtctcaaaaaaaaaaaaaaaatacaccagttaaaaagtcattgtttaatgttttaaattagatgagtttttcaaatatatttatttgatcctcagaacaacactttgggttgggtcagaaaagcattattttacaaagatgaaaatgtagttttctggatacagtgggaataaaaacaactaattttttgtctgctagcactttctagttgctttacttygtgtatcatctcatttaattaaatcccttctcctagagatagctaatattgccatctccattttactggtgaaaaggtttaggaggctttcacattatctaagttaaatagctaataagtaatagaacgggcatggtaaactgcaatccctgctctgtctagtgtccagggtcctttctcaactctgcactctttcccctttatgtgtgtaggccagatggttccttccttctggcctgtgcctctgcttagctgatactcatatgcacctcttcctcactttttcatctcttgctgccactttctcctttttatttagctccaaccatttcctatcgagtggggaggtatagcatggagggtgcaaggarctcagacatttggatggatttatttaccatttatttaactgtctttgaccagaaaagtatttccagctataaggaacttgacttttatgtttctactcgtggttttccctgtttggatatttacaaagtttaattgttttgtttgcttgcatcatacctattttttgcactggaatgttagcttcattggggaagcctattcacccttgtgtttccagaccctgtgactttgagatgctcaatatagtatatctgctgcatggataaatgatggcttttggttttcaaatataaatttcttttttttttttttttttgagacggagtctcgctctgtagcccaggctggagtgcagtggtgcgatcttgcctcactgcaagctccgcctcccaggttcacgccattctcctgcctcagcctcccaagtagctgggactataggtgcccgccmccacgcccggctaatttttgtatttttagtagagacggggtttcaccatgttagccaggatggtcttgatctcctgacctcgtgatccgcccgcctcggcctcccaaagtgctgggattataggcatgagccaccacacccagcctcttttttttgagatagagtttcgctctgtcaccaggctggagttcagtggcasaatctcggctcactgtaacctccacattcaagcgatactcctgcctcagcctcccaagtagttgggactacaggcgtgtgccaccacacccagctgatttttgtatttttagtagagatggggtttcaccatgttggccaggatggtcttgatcttttgacctcttgacctcgtgatctgcccgcctcagcctcccaaagtaaatttcttttaaagtattttcatgggaagagttgaatagtagctaaaagtaactagtttacatgtcccaaaatataatgtatgtctattggggggctttctgggaatttgaatttttatgcaaatatttattctcataggctgaatgatacactaggttctgtttaaatattgatcttgggattttcctctgggttctatcagtagcttcagctgtgttatgcttttcttaaaattcatttgttaaggtactgcttttattatgctttgtttctgtgtaaaaatctttattttacatctttttctttgagatggagttttgctgttgtcatcgaggctggagtgcagtggcatgatcttggctcactgcaacctctgcctcgcaggttcaagtgattctcctgcctcagcctcctgagtagctgggattacaggtgcccgccaccacacctggctaatttttaatatttttagtagagacggggtttcaccatgttggccaggctgatcttgaactcctgaccgcaggtgatccacctgccatggcctcccaaagtgctgggattataggcatgatttactgcacctggccttttttcttttttttgagacagggtctggctctgtcgcccaggctggagtgcagtggcatgatctcagctcactgcaacctccacctcccaggctcaagtgatcctccctcctcagcaatccaagtagctgggattacaggtgcacagcaccatgccaggctatttttaatttttttgtagagacaaggtttcaccatgttgcccaggctggtctggaactcctgagccccagcaattcattcacttcagtctcccaaagtgctgggattacaggcatgaggcaccacacctggcctttatttcatattttgttagtctacaataatgtcctggcccaactcttcttcccaaattttgaaattactattttggatagaaaactggacttatcttgagttgattgcttttctctaacaccaaatgattttatgtttgctttgaaattaatacttgtagctaattgaaataaatttacttcagttaagtattattaatattttccccctactctcatgcttacattcattatttcttaatttaagaaggggtatttagctaattttcattttatgtatgtataagctgatttggcaagtgtgattgagtaacagtttataggtagtatgtatttatttaatttaagacattgttttaaaactttgggttatgactcattagtaatttataacctagttagtaaactgcaatgagcattattttttaaatagaacagaaaagaatggaaaagtcagaatgcattgcacctgagaagaaatgggggcgttgtaacgtgtggatttcttattgtgggctatgggtcttaaaacatttggaagccactaattggagaaatggtaagatgtagaaatcataaattataaattcaacattttatgagattactgaaatgtgatctcttttcccatttttggttgttttaagataaaataaaccatagttcatgaatgtgtgtgtgtgtgtgtgcgtgcgtgtgtgtgtgtgtgtgtgcgcgtttatgagatgctaacagttagtttatccaattttaaggaaatctttgaccaaagagtttttctcccttcaggtggagtataatgacatatgaactcaaattgccaccaaaagcttccctacttccaggacctccagaagcatctgaagaattttatgtaagacttaaccctttacctatcatttgaaatgggggtggatatcttgagaaaaaaaaaagaaagagagagaaaatgtactcctaatatattgtggtagcatgttaacttaattttatttttggggtatggtctcattgactgactacctctagtcctctcccccagagagaagaatcctgaatctaggctagagtccttccatgaccacccacaccgggagtgcccagtcactcctcttcctgggactcttcatgtgtaaagtgaggctacaaagtcatgggagttaaatgatgtaacagatgtgtaaagcactatctcttctcctgcccagataattcctccctgcatgttctatctgcctgtttccgttttatcagcagagctctaggaaggtcagctggtgtttcctgttagtgtttattcatcttctactttggccattagattgtttgattataagatgttagcttctttaaacagtatccaaacataccaatactcgtggccagaatattatgcaatttctgtcttactgcttgctttgcgtactcttttcttgttcttttctttttgagacagggtcttgctctgtggcccaggctggctggaatgcgatgatgcaaacacagctcactgcagccttgacctcctggtctcaagagatcctcctgccttagcctcccaaagtgctgggattacaggcatgagacactgtggccggcccctactcttctgaagggacagcaagacaggtctctgggttaagcctgttgatatagttaaagaaagaccacttaattccatctctactacagaccataaatgactaacgtttttaaagattcagcattctgattaaacctcaaagcggtgtagatttaaaacagaacctgactttcaaaggattaktctctgactcattaagaccatttgatctatgctagcttatttttccctccaggaaaattcatctgtttattttacagttgaaatctttgttttgtcattaagaaaattatgatcttgtcaaaaccaaggcaaggaatgataactaaaaacatggggccgtttcttagagaagctaattgtattttaaaaactttttctgacataaaaactgctgatagccaaaactgcttctaaaaaaatttgggaaatacaaaattatatgaaaaagaaaataaaatcacctgtagtcctaccacccagagataatcactattaaagattaatatatttaccattttattttcagcagcatttttagttatgtgattccataaacataacacatttttayggaaatcagtcctttatcttaacagtatttttgtaaatgttattaatttctttccaaaaaagacaaaaaggagaatttttttcttccatttacttcagaaatgtctgttttctagcatataaaataacagtaaatatttacttttatcacgtgtataatcactaaatatgaggtacaattctaaagatatgaaggaaatctctctttttttgtacaaaagagttttaaatgaaactttgctttttaaaaataaacttacttttgtaacaaagggatagcatactttaagataacagattaaatgagtgttctgaatggccctgactaggccctgaactaggctggcaccaggaatgcattttactgtgtgtggcctttttaccttgaaaactgcgataaaagtagactaaatctttcttcttagcttttgtatacttcattagctgtgggtcttaggcaaattactcagtaagcctcaggttctttggctataaaacaggacagaggggtaaatatatacagagtgcttaattacagcgcctggtacacaatgcaaaatattaactcttattattacttacctttctgaccgtgctaagtgactgcatagtaggttaataagttacatctataattttatctttgaacatagaggctattttattttcctctgagagaaattgtattttttgatcttcaaatatttttaatggacaaaaacttggattttttgaatgtaagtttcaaatggcattaatcaaatgttattaattaatacattagtcaactggcattaatgaatttattaatagcattaatgatcatgtaaaatattttctaccctgcagggaagaaaaataaaaccaatctctggagaacattttcttttttcaaattttaaagtttatttttagattatatattttcatttttctcatcctagctgtaaagatgtaatttttagtgtttaagagatcagtaaggtggatttgtgggtaaatgcaacatcgtgtgtaacttgggagctcctggcctcacttcctttctttgatgtaaaattgctttcctgtagtggtctgcctttgaaggagaatgtagaaatttaaaagagtaacatacttttgaaagagtaacataaccacttgtggaatgaaggtaaattaggaatgtggttcttttgggaagagtctagtcaggaaagctttgtggggaaggcttattcagacttaattgaatcttcaaataagtctgaataaactgaggctgattggtagaagtaatgaaaagatacctgagtcaggcagaagagcataggcggccagcttgcctagagcagatcatttatactagaaaattttgcgctgtgtgaaatggaatattatttgaggcatacatttgatgtaaggctctgaatatgaggctgtttaaatattgtgcacatttttacatattaggaaaatgtatgtggtctttcaacgggatgttaaagtttgagtcaaatagaaaagggattatggatgcttttggcattttgactattgtttaacagaaatatttatttacatgattatatgaaagtgtattcagcatttttaaaaacttttttattgaattatacatacagaagagtgcacaggtcataaatgtatagcttggtaaattttcacaaactaaacaaatctatgccaggccacccgtcagtgttcaagtatcccataagccccctcatgccctctttcagtcaagacccccacctcctaccccaataatcactgtgctgacttctaatagcatagattggtatctgttttgtacttataaaatagaatcattttgtatgctctcatttgtttctggattctttcactcaatgttatgtttatcagattgatctatactgtggcttggctataaatcattcattctcattctcctatggtcttccattgcacaaatacactgcaatttgtcatctattctactattagatgaatgctgctgtgaacatcctagtgcatgtcttttggtgaacacaattttgcatttcttttgggtgtagatatagaagttgaatttctgagtcctgtgatatcattgcatatgttcagctttaagagacactaycaaatcgtttgtgagagtgtatcagtttgcattcccatcagcagygtttgagaattctgtagctccatagccttgctagcacttgccattttctagttgttttcattttagccattttggagctgcatggtggtactgcattgtggttttagtttccatttgcctgatggctgagattggatatgttttcatcggtttatgggccatttggatatttttatatttaaatgtctagtcttttgcccaatttttattagattttttggcttttattgtactactttgtaggaattatttttatattgagatatttttacattaaaaaattttgtaaaggagtttttatggatttctataagaatataaattaaagaattccagaaaccgaaagccttttgccaaaaggaaatatctattttgcatgatgactctttcatatatttcattatagtgattgccttgcctaaacatatgtcatgaagggttccatttctggagcagcaataagtgagttgtataaatgccagcaacaataatacagtgtagagttttcttttcttcagatgacgatttatgaagaytcagttgcaacgcatcttacaaaaatcctcaattctgatgaacatgcagtggtcatatcttctgccaagtgagttgtgggttttaagtctttaaatatggtgaaaatgaaatgatagctggctcctaccatttaggtcatttctttgtgagttttcttctcaaaaaatrtcttggaagtagcttataaaattagatgtactaaatttgaattgatttttaaaaatcatgttagcatcttatttgcagtggtgtatacttagagggtatttttttaatgtttaatttgaaacatttttatcaaaaaggtgtaagaagcgtttagagtttaattaacctaaatgtctatttaaggaaatgtttatgattacttataatatggaaaacacatttcattataattcattatttccataaacactactatttaggaactgtttacatcacattagaaaaaggaaaatgatgagatttttcaaaatgatgtttctcagcatgtttaaattgaataattacattttaattcaaagttatcatattttagtgaagttgattttgtacatggagccaaagctacttgatgttattatcccaaatgttgcctggctggaatttagaatttagttttgaaacatcctatgctgatgtcaagagactggaaagtcgactagaagaaggggtgacaccaactgaaattttcaactgataagcaaaagaatgcattcaaattctggcttagcaagcacgggttactgttatgcaggaagagagcagaaaaggggaagaaagaaagaaaaggagtgggaaagtggtaaagaaaaaatatacaaattttggtatattatgtacttaattcacagtaaagttgaggaaagacaagatcaatcattataaacaaatttgcttgtgaaaaaagtacaaatgtagtaacaattgcttttgacaacatattccccagaaataggaagcaggactgcacaacaggaaaagaattgaatggcttacagcaagggaagcacactagttggcccaggagaggtgggctgcagactgtatttggcgggcagtgctgcaggtttctgttttgtgcaaatattggactaaagcatcttctgccatttttacttaattgaaaacaattttccttacaatcatgcaactaaaataaaatacagaaataattggaaactgcatcgaatagaagactgtaactgtcatctgtaactttattgcttaatttttcttgtaaaggagaaaatttaattctatctaatttattaatgtcaacaaaacagagttttagtattttaatattggaattctgtgtaagattgtatttgaaccaggtaccgtggctcatgcctstaattccaacactttgggaggccaaggtgggcagattacttgaagcccaggagttcaagaccagcctgggcaatatgacaaaacctcatctctactcaaagtatacatactaaaattagccaggtgtggtggtgcktgcctgtagtcccagcttctcaggaggctgaggtgggaggatsacttgagcctgggaggtggaggttgtactagagctaagatggcaccmctgcactccagcctgggtgacagagtgagatcttgtctcaaaaaaaaaaaaaaaaaagattttattagagaaaaggtttccactgccaaaaatgttgtactacaaaggtgttaagattaagaatgatagggagaaaaaggggtggctactctaattatcctgtttgcatctgtagaaatttcttaacaagaattccacttcattaaaaatatgtgaaatatatgaaaggtagtgatcaaacacatgaaagtaaatataaaggttttgctgacatccaaactataaaaagtggccagttaaaatatttacttaactatattaaacaaaaaataattctcttatgacttgctataccttaaaaaagcttccattacagctttccaccttttctagcaatgtcctctgaaatgtcatatcaaaatacatttgattcacagggcaagggccagcccatcacttaggtgtatgaactgggcctgggatgagaaagacaatagggagtgctaaagcctgggacaaactggagatttgtccatttcaccatcaagcaatacaattcattgaaaaccccagtggcactgcccaccaaacaaagagagtgtgtagcccacctctcctgggccagtcattgtgcttccattcagcgytttttctagtgttcaatcctgtttcctatttgtgggggatatggaaagaaggcctgttatttctccctcatggaactgctaggataattaagctgagtaatataataagtatagagcttataaatgacagagggctgtattaaattatggtagcatcacctcacgttttacccgattacatttcagatgttttctttgaccttggcctgrctctttgtctaaggctctgctcccagccctagctttgggtttctccctaaccagcttgcctgcccttaagcagattccattctgatgcagcatccctcctgtcactcactcatctatgcttccaggcctttacaaccccagatacaattctagggaatttgccataaagaggctgaagagaaaaaagaggagacaatatataattatttggtactagtaatacaatatatgttaaattttatttcttcttmttattatttttggaagaaaatcactttattccagttatctcacaaacaataaaatcacaacagctggtttaaggaggccacacatttacccagtcccaaattctataccatcttaatgaaattctgcacagtaagaatatcctcttcggccgggcgcggtggctcacgcttgtaatcccagcactttggaaggccgaggcgggcggatcacgaggtcaggagatcgagaccatcctggctaacacggtgaaaccccgtctctactaaaaatacaaaaaaattagccgggcgtgatggtgggcgcctgtagtcctakctactcgggaggctgaggcaggagaatggcgtgaacccgggaggcggagcttgcagtgagcggagattgcgccactgcactcccgcctgggccacagagcgagactctgtctcaaaaaaaaaaaaaaaaaaaaaaaagaatatcctcttccactgcaattctgaagcaaggaagctatgaatgacagaggagaggcttaactgctggtttctcactttataccttcactatctgttacatttttatgctaaatttacttggtcatgaaagctgattttccatgtcttcagctgaacttgattaggccagtccatgtgcacgtctgcactgtttcagcacctccttggaaccctcactgagcttgacatcaccctagttctgggaacactccagaaactgttctgtcttatacaagcaaggctgctgctgctgtgcagctagtctcccagaggctcctggtaagtgatgtcaggccttgtgagcccagcattacttcctctgtttaagccaccccattcccatgatagttgacccagtatatgccccacagcagggcccacagccacgccagctgcagtggttgccatctggaccatcagacctggctgccaggatgcagcagcaggagactcaactgcagtgggtggggccacgactgctgctggcagctgagctgctggtgctggccggggtgcaggtctcattggaggtggctggctggccagaggggccatgctggaggtgcagctttgacttccatgtgccatcacaaatgggcagtggctcagcatctctaaattttatttttatggacattttcaaacaaaactgatataattacttcccaccgtacccatcattcagtttcagtatttaccaacattttgccatctgcttcctactttattttrctacagtatctctaagaacatcctgaaaattattctactacacttttggtatatagtcctccctctctatccatgggggattggctccaggacccccttggataccaatattcataggtactcaagtccctcatagaaaatgccatagtatttgcatataacctacacacatccttccacatactttaatcatctctagattatttataataacaaatgtatttgctatgtaaatagttgttatactgtattgttcagggaatgatgacaaaaaaaagtctgcacatattcagtgtagacaaaacaatctgttttctttttcaaatgttttcaatccatggttggttgactccatggatgtggaacccatgaatatggagggctaactgtatgtgtgtgtgtgtgcttgtgtgcacgtgtgcatgtgygcacatataatctttttaaaaatctaaaaattaataataattctctaacactatcaatattacttaagccatatcccatttcccttagttttctcagaggtttttctgtgaaccttgtctgaattttgacaaggtctttaaaaaaaaaaaaaaccacacacactttatttgttcaaaattcagacaatgctcacacactacatttgagtgatatctctttaagactttaaaaatcttgaccaggcatggtggtccatgcctataatctcaacactttgggaggccaaggtgggaggattacttgagcycaggagttcaagaccagcctgggcaacatagtgsaatcccatctctacaaaaagttttaaaattagctgggtgtggtggtatgtgcctgtagtcctagctactcaggaggctgagttgagaggatcctttgagcatgagagttcgaggctgcagtgagctgtgatcacgccattgcactccaatctggatgacagagtgagatcccgtcttaaaaaaaaaaaacacttaaaaattctataatggtttccctttaaaaaacaattcttactgaggcatgacatatacagtaaagcacctaaatcacaagagcacaactcaatgattaaaaaaatactgcatgtacgcacagtcacacacagacacacatacacacttgtaattactacctagataaagaattccctttttttgtgaatgttatttatttattcagtgatacaatattaaggcaaaatgtttaaaccctcttgtgcctgtttgtatttatttcatgcaataataattcccagtagccttaactgttttcagctatttttaaaatgttgaaatgctaatggaaaagttgtattccactaacatagctaacatgtaggttaacctaaaacaacatttctttgaccttagaacttcatcaatttggtatggtaataagagttatcttctgagaatcacagctctaactagcaatcatagataccatttattagtaaaaatgtaaaacagttattaaataagttgtctttagctacaatgtatgtctctccttttatttagtcagtagtttaaaaacttttttagctttaacagtaggagttaattaggttttttacttacgcactctactcaccccccaagttttgaaataaatgcattttgttctgtgtacaaaagtttcagaaaatgggataactagctagcaggaatattgacgccattgtcatagaaccatagaatttagatttggaatctactttrgggataatttaggccaacccgcctcatttaattggtaaagtgaggtagttgttaaaaatatttcctcagagcacaaagayagctagagacaaagatagctagagatttttatgtattatgcattgatacttctaaatcatcttcagtttcaaattggaactttttattagatgaaaaatgaatttttcagatatgatgaccctgcctgccaatctatgattctgtctgggtaccattgccatattwatcttagtgtagtatgtgcatattttrctgtcatttgcccacactttaagaaattaagtggaaaggtgataaatgagggtactaatactagtgatgagaagtatgggtctaacatatgtaatatagtagagatgatagtggaaatcatcaggtatgtgaaatgtggactgttgttagcctcaactgagtatttggttcacacagttgactatgttcaattttgaaggaagagaacaaaattaaggaaataaaatgttggaaatgccaaaagttctgtctaggccttatgcagtggctcacccctgtaatctcattgctttgggagtgcaagtcaggaggatcgcttgaggccatgagttagagaccagcyggggcgacacagagagactacatctctaccaaaaaaaatttttttaaattagctcagcatggtgacatggacctgtggtcctagctactcaggaggctaagctgggaggatcacttgagcccaggagttcagggatgcagttacctatgatcacaccattgcactccagcctaggcaactgagcaagacccccatctctaaaaatgtttttttttttttwaaaaaaagttctaacattgattaaagatataattaggaatttagaattttttaatctctatgggaaaatctgcattctactttcatttatttgacttttgcacatattttctggaagtcttatgtataaagtagaaaactgtgtgtatagttggagaatatcttttgtcttcctatagtaaatacatcttaagattgttttttctccaatttgcacgtttctggttggtaggactttgcaatcatactgtttttaagtatatattttatttctgttttaataactctacattcactatttaggtataataaaaggttacttcattcccccagaatataaatatcctatattccttttagcatatggaacttaatgagcaataagatagarcatgtcttctgattctttccacacttgtgtggcgagcactctcctaaccttcacatgccccttcctcagctcctttggccaccactgccacaggatcatagtgtctctgtcagcctctgtttgcctcagtgacayggcacactgaggaggggcacccctgctgcccttttcattcctaggctgatggactgaagggctctgtctctaggagtgaataagataccaacaaaagcagctatgataatgatatgacatatgcagtttcacaaaccaagagaaaattatgacaagatgatgttataataatggcaagaaaaacctctatttcagagttacaggaagatgcatcaatgctcctctcycttaaagtagcgcattttacagaaactttcagtaaaatgcctagaagagattttgtgatagtgttatatatatttcgagaaatcccatgaagtattgttcatgatcaaagaagacaaaacttgacatgaagtacatgaatgcatgtctagtaaatgataagctagattctctgtagaaatttgagtttaaaaagccaacaaagaaggttcaggattagaaaatattaccttttgttcaaataaaatctagaaatgtttgctaaaaaataataaaacaaaaattgttaggaggaatacaatttccaaggtgataaatctgaaggttggtagtgtgtgtgtctgttgggggaggagtggtggtggtggtggtgtgtgtgtgtgtgtgtgtgtgtgtgtgtgtgtggtatgtcctgtgtctattgaattgctcaagttcataatactgaagtatatggaaatttaccattttgccactcaactaccagagaaagttgtgagtgtaatagaaaaaataactgctggaaccttttttaaatttaaatttctcaatttatatcaatgatagaaagcaatactatgatttaaaaaatagcctgattctatcagcataagccttggctttaaaaaagctggtcatataccattctgttgattgttgtttttaatccagcaccagatccagatccagatccaaagcctttcaaaaggcagattttgttagtgtttcaagttattttgtcttttagcttatttctatcgcaaagaagccaaatgtaattaaaataaacaaacaagtaaaccatatactgctgacactaacaagacctaaattaaattagtcttgtagttattgcattgattatctcaaggaaaaaatgaatagatttacagagaatataactcaagtggcagatttgttttcagcataacgcacaacctctttctcttcagtaataatatattgtaactgtaacaatcaaaatatccatatgatgagtcgtggcttgacagtgacaagtgacaatcttatttttgttcagcaatgtaatttctgttatgaaaatatgtaagtttagaatttcagtggagaaagcaagatgatgctttatcatttttaaatgggatctaaaaataatttaaatgtttgaggaaagcttcttataacattaattactataatttaagtaatatacagcaaggcttattcatgtatgcatttatcacttagaatgtcttggacttatgtgagacaaactgcacagcagatagaagcatagatttatatacagatgacccagatatttgacagtttgcttaattgtgtttctttttaaatatattcataaatcaaggcaaattaattcatgaagcttactaaattgtacaacttcttttcctcaaaggacgctatgtgaaactgtaaaggacttcgttgccaaagtagaaaagacgtatgacaaaaccttggaaaatgccgttgtagctgatgccgtggccagtaaagtaagaggggactcttcagggcatgagagttgtttatggacaatgctcacattcaactgtgtttcaaagctaaattgattaggtggttttcctgccaaaacatcttaaatcgagrgaaaaattactttggatcagatctgagaattttaaaaaatattctattttattgttaycctttaatatgtaggaaaactgcattgctgaaaacctaactcaaatccctgtcccagtgattgactttttttggagacagagtcttgctctgtcacccaggctagagtgcagtgatgctctctctactcactgcaaccttcacctcccaggttcaagcgattctcctgtctcagccccccaagtagctggattacaggtgcttgccaccacactcaaataatttttgtatttctagtagagacggggtttcaccatgttggccaggctggtcttgaactcctgacctcaggtgatccgtccacctcagcctcccaaaatgctgggattacaagtgtgagccaccacacctggccatgattgactgaaggggagatgcatagcagtcagaccacaggggatcccatgcagctgggctccagtggagaaagcaagrttttccatttccaagcagatttgggccagttcagytgtcttccagcatggttctttggatttcctagacattacaattcttggtctctttcagagtgctgcttcttgcattgcttttttctttacagatttctttccccctttataaactaaaatamgaacagtttactgaatcttaaaaactaccatctttgstttcattggttcacaacaggaccttcttacaaaaggcttgagtatcttgggcttgcaaaggaattaacttccccaaatccatgttggagatggcagtttaattgagtggaagaaaaagaaaatagaaataaatatacatttgaagttttctgcctttttctcttgtctttctgctctgtggagagtttcagaaaatagaaaccctttctggccatacttctgtctctaaastatttctgctctaaccttgtctcagcatatcatcaaagacaaatagatgaggaggaaagggactggaaattttatggagatgaaaagtatattggggggtagcakcaacagcttcagtcctaaatgtttcttcacctctcgtaatacaagaaaagcagaaagaaacaagggcttgcctagtgcatgcttttctttctgtatccctctycttttccctccttatccttgtgcattttccttcctgcactttctttgagccaataatcccttaggcattgttcactcctttgcaaaccaaagcttygaaggggagtttgccacaactcagccagatgtgccatttatgacgctcaaaatggtgcattaagtcaattactttttttaaaaagttgatccaatgttttgtgtaatgtatagcaaattttgtgtaattttttatataaagcatccctttgtataaaatgtctgttgtgttattttgagaaaaatagctgtataaatattataaagatttttttccccatgaaatggagtctgagtggctctgaaattatrtaataattgtgccaacttaaaaaattataaattatttcatgtagtaaacatcaataaagccattgtccctctaaatmaaaarccataatttaaattatarttgtctatctctactaaatggagattttaaaattagctgcttccagaaccaaaacatctacaaaattaaaggtgagaattttrgtgtttttctctctagtgattaaactttcaaaacatctctataaaaatttcttgtactttgtctgctgatcttgattctttttgartatttttctcattrccatattttcctctcagtgttcagtcctaaacgagaagctcgaacaactgctgcaggctttgcacacagattcccaggctgcgcctgttctccctggcctcagccctctcattgtggaagaagatgctgtggaatcgtccagtgaagagtccctgggtgaaagcaaagagcagcttggggatgacgttacaaaaycttcctcccagaaagccgtcaaaccaagggaaatcatgttgcgggcaaatagtttaaagaaagcagtgaggcaagtcattgaggaagccggaaaaggtacacattaacaaatttagctttggaagaagttggcagcatttctactgcaagcataacggagtttccatagtggtcagattggacacactttttaaaaataaaatttttaaggcaagatagaagatacagtcattataagaaaacttgtacatagtcttatatattgttatggtagtagtaagaatcagcatattagtgaggaataaaataaaatagcagaaataaatggaaacatttctatctaaaatacaaaactagtttaaatgacatttaaaaaattttagatatagtttacttaattggaatctgttgaattcttaaagaaaataaaacctataaactactttgaaaatatagaaaaaaaaattttttgagaaagggtctcactctgttgcccaagctggagtacagtggcgtgatctcagctcactgcaacgtccacctcccaggctcgagctatcctcctccctcagcctcccgagtagttgggaccacagatgtgcaccgccatacccagctaattttttgtagttttggtggagatgggatttcaccatgttgcccaggctgatctcaaactcctgggctcaagtgattcgtccacctcagcctcccgaagtgctgggattacaggcgtgaaccactgcaccctgccagaaaatattttcttaacattaatttcccaaatgtttatgttgctttattaagagcttataaaagctctgccttgttttaattaatgtgtatattaatacttctcagaattttagctatagtctaaatgttaattttagtatgaataattaatgttcaaaaacccctttatagattgtaacttgtaattgtatttcattctctaaaattcttatactttacttgtttattctgataaaaatataattttagcaactttagtttttgatctttagttcttcggacatcaaccccaagttcattgctaaatagtgtttatttgtgaatctggaatttygtttggcatatgtttcaatttgcctttcctgagcatatcttaatattaatgggctttattttcacttatccaaactatttgtcttcttactacctgaagttatggatgacccgacagttcacccstgtgaaccagctaatcagtcctctgattatgacagcacagaaacagatgaatctaaggaggaagctaaagatgatggtgccaaagaatcaataactggtgaggaaactgggaaaaaattattttggaattaaataaaatgtcattttgcttttagttttcaaaaggctgatcagtttgaaaaaaactatttgtatttttatttttgaaaaggctttttggaagttaaagcttagataaatattcatgaataataaaacaataaagataacacctagactattgtccagtactctcacatccctctcttatcatgtaatctagagattataacaataaactaaggattataggactaaggatgattaaatatgttggttttcctgaggaaagaggaaacacctaaatcatctgatttgaacctattatagctcacagatttctttgagaattgtaagaaagctgcagctctcctaacgctccaaatgcagaaaatttggcatttaagtgattcagcagtcccttaagttccatcgatcaaccttctgggttgatagtccttattaagcttcaaaatcataggactttaaagcaagcgttaaaatcactggacttctaattacagcccttgctttgtcaaaactattttggtaaggaaatgaatatgtaattgcttgaagaatgttaaatatctttctaccttttagattttaattgaaaatgaatttatacttttaatattgtatattgcctaagggaaaagtttctaacgtactggaataaaacaaagcagaaattaaactattaatgaagatgagacaatatgaaaataaatacatggcacttatgaaaagtcagcacaattatatcagaattgtttgcagtcattgggggcaatagacaatagacattggggactactagaagtgggagggtaggaatggtagaaaagctaactattgggtcctatgctctgtaccttgttgatgatatcaatcataccccaaacctccgcatcactcaatatactcagataataaacctgcacatgtccccctgaatctaaaataaaagttgaaattataaaaaaagaaattgtcttcatacaatgaaaaaaaamcaaatttttggagagctgaccatatcagattaacattttctgcttgagctgtggcatgatgaagacctttcattccccatgtttatggccgatttttccacaggactagtagtagtgagtacattttaaattttacatgtttgaaacatctcttgttaactatgaaaaaaattagatagtaggtttattaatatgttgttgctaaatttattccagctttcatatgaagctaaataagtaaaacgtaaacttaataagtaaaagaaagggtagttgataaagttactttaaatttaaaaacctgtttttatcttattctcaaaaaattttaaaaaatgtttgcaatcattaaatttttgcttttactttcactacatrtaaacttgggcaaatttcttaacctctttttggttttctcatctctaatatgaggataataatctacctacttcattgggttgctgcgaaggttgaaaagttactataagtaaagtgcctagaatagtgtctggtagatagtgctgcctgagtgttcactgtcatctttattgttgttatttttattgctactactgctgctgctgctgtcactaattacattaacggtgagagaatatttcattgtacttgagactcttaaaaactttgaaatcagacctcatggacctcacatgttcagcataccacccaatgcaggcatgttctaggacccttgaagcagatggccacaagccttaggaccactcactttcaatacatcccactcttatggtcagctctaattgttagaaagtcattctttatattgggctttctattttctcccctaaatttctacccatgattacagtaattattaggttttatgaatgatagtttgacagtaacaactactggcctttatgtagtgtttatggttagtttaaggagcaatttcatatacatttgactgtatcaaagaggactctgactctggagctatttctcctcttccttctcctcctcctcctcccttcctcctcctcctccttcttcttctttttcctcttcctcttcttcttcttcttctcttttctttcttctttcttcttcttcttccttctttcttctttcttcttcttgttcttcatgtggcagcccttwaatgataccaaaaacagctttggtgggatcagatcttctctcaccttacatcttcttttccagatgatctgccctaaggtttctctaccagtttttaaactgatgattttaaaccttttgttttccttgttgcayccatttggtcaatgtttatcttaaaatgtgatgcaccattttaaacaaaattcttcagatattttctgtggtgtattagcacattggtacccatacactactcattaaggacatttttgatgttacaaagactactcaagacttctcttttaaaaacctaattatagtagtttacactcatcccaatgaacttttatcttttttatttagatctattatttcatcctgtgaagctctttggaagcttgattctatcatcttaagtttatttcatctgtgaatttgataagcagrcctttgatrttttcatctattagaaagtgttgattacagcagagatgacaatggcatccttactatacactgataattcctcctaagatgatggctgttaggaggattggtttgtcaaagcttatttaatggttttccaaccggctatcatcccaccttgccatactcttaaacttgacacttccgttgtggcctataaaggaaactaaaaaatacaaatatagtgmtgtaaatgttgatattgaaatagacagagatttagaaaagtctttaatggtacagtatttggtctttattttggctagtaatctaacttgttggaaatgaatagcaatagtggaagtagaagtatatgaaatactactttttgaggcacatttattgtatcatcatgtaataattcatatgtctgagatgtgagaaataccgtatattaatatgattgatgagatgmtttatttaagaagaaccagaaaacattaatttagttacttgtaatggaacatcagtcttagtcattagtacgctctctgctttttgtcagagttgaacatcaaaaagttgtttttatgagaaattagcccaggagtcctatctatttaaaaaaggggtggctgttctgttactttagtgcaatgggactgtttwtgaatgagacaatagagtgtaaaattaatatagttagcttgtaattagttttagggagagtgaagataattaagttttagagtattttaaaattgagtttgagaattactgtttcttaaaaatacctaccagtaactcctaaattggttaaaggtaccatttgctctgcattaacttgcctcagtttagagttaaatctttcttcttgttgtgtactttgagartaattatgttttagaataattttttaaatgtattgagcttttacaagaatatgatagaactgtttgggcaaatcatcattttgaataaataattgagaagtacaggaaaaataygttcatttcacttgaagatggatgctatttttcttccatttatttgtttatgtatgagacagagtcttactgtgtcacccaggctagagtacagtgatgtgatcatagctcactgcaacctcaaactcctgggctcacgtgatcctccagcctcagcctcccaagtagcagggactacaggtgcatgccaccatgcctggctaacatttttatagagrcagggtctcgctgtgttgcccagtctggtcttcaattcctgacctcaagtgatcctcctgccttagcctcccaaagctctgggattacaggcatgagccaccacacctggcctcttccatttattgaagacaatgttaaatcatgtttcacgtgtttgctctgggaattacattaattaaatttgatcattcacttgatatttatgagacaaggattacatgggtagtgtgcattataatacatatgtttcattttcaaaaatrgacttcaaaagcttcatttatctttaagtgtgcattgatcatattcaaattttgagtattagtgacctttaattatggtagacatctattttctactgatattcattgatttgagatgaggaatcaagacttcttattccctccatgtaagtctcaagaaaatgtaaacgatagctatgcataatattttcatttctactgattgatttaaacattattttatgttttaaatttataggaacgtgcttatttttatagctttatcattatctctttttaatctggactttttgccaacagttaaaactgcacctcggtctccagatgcccgggcaagttatggccattcccaaactgattctgtccctggtccagctgtggcagccagcaaagaaaacctccctgtgctcaataccagaataatctgcccaggtagtacagattctgaaacatcgtgtatttttcagtatttctgtgaaaaggtgtaagtatttatttctattactgtggaaacatgttcttaaagataaatrttctttagtagaatgttcttgttatactttcagtcagaatccaggcccttagattcttccctgtgtaacagttgcctagaaagtattaaaacacwtgtttcggccaggtgcagtggctcacacctgtaatcgcagcactttgggargccaagatgggcagatcacaaggtcaggagttcgagacaagcctggccaacacagtgacaascctgtctctactaaaaatacaaaaaaattagcyaagtgtagtggtacacccctgtaatcttagctactcaggaggctgaggcccgagaattgcttgaactcgggaggcggagggtgcggtaagctgagatcacacyactgcactccagcctgggagacagagtgagactctgtctcagaaaacaaacaaacaaacacatgtttctgggccctgccctgggaaattatgagtcggtagttctggagtggagtccaggaatctgcatttactaagttcccaaagtaagtctgaacttactaagttctactacttcttaagctttcctttggtgtttttttagtcagcattctgctgaatccttttggttttaagccatgagtctctctgtagtcatttttagacaacattgatgtaaattattcatgattttggattaggcaatgatttctcagatatgacaagcacacgccacaaaagacaaataaattggacttcaccgaaatgaatagttttgtgattcaaaggacactatcgagaaagtgaaatgacaatttaagaatttacaaataatatatctgataaaggactagtatccagaacatataaagaacccttaaaattcaacaataaaaaggtaagtatctcacttttaaaatgagaaaggaatctaaatagacattttcccaaagaaaatacacaaatagccagtaaatacatgaaaggatgctcaacatcgttagtcaccaggggaatgcaaattaaaaccataatgaggtgcccctttatgccactaggttgactgtgatcaaaatagacagatgataacaaatattggcacagatgtgaagaaattagaactttcatgcattggtggtaggaatgtaaaatggtgcagccattttaagaatagtttcacagttccccaaaaagttaaacatagagtttacatgtgacccagcaattttactactaggtatacacccaagagaattgaaaatacatgtctacacaaaaacttgttcatgactatttatagcagcattcacaatagccccaaagtggaagcaacccaaacatccatcagttgaatggaagaaacaaaagtgatatattcatacaatggaatattatctacccattaaaaagaatgaagcactgatacatgctatatagaaacactatggaaaatgaacataaaagccaaatgtaatatgactgcatttatatgaaatgcrcagaatagtcataacgcatagagacagaaagtagacggtggttcccaaggacctggaggtgaggtgatcgacggaatggaaaatgacagctagtgggtacaccgttactttgcagggtaaygaaaaggttttagaattaacagtgatggttgcacaactttgtgtatatattacaaacaactgaattatctaaaaactttaaaagggttaattttataatatatcagttgtatcagaatagaaatattaaaagaaaaaaagaaagatcaatctgaaacaaactggttctggaaaggccttcaggtttagatgctgtgtttctattccaactaggaaccttgggataacccctctggaataaagctgaaargaatatggctaaccctaaaacatcttagaaaatattaacatggctgggcgtggtggctcacgcctgtaatcccagcattttgggaggctgaggcaggcggatcacctgaggtcaggagtttgagacctggctaacatggtgaaaccccgtctctactaaaaatamaaaaattagccaggcatgctggctcacccctttaatcccagctacttgagagactgaggcagrattatcccttgaagcygggaggcggaggttgcagtgatctgagatcatgctactatactccagcctgggcaacagagtgagactctatctcaacaaaaaaaaaaaaaaaaaagaaagaaagaaaatattaacacttccctctagggcagctggagtgtggctctcacctctccaaactgttctttatgcttactaaatttattgttttcttcattcatttacttgtttagacataagggaaattggcataaagaagtatgccacagtatattcaaaactatgacattaaacgaaagaacaaaattcattgtatttgataattgcctaaacattaaaataatgaataataataattccctaagaagagcatagtgctgaggaaaggaatgtttgctaaagaaaggaattgctgggcatggtggcacatgccctgtagtcccagctacttgggagactgaggtgggaggatcgcttgaaccctgggagatggaggctgcagtgagctgtgatcacaccattgcactccagcctaggtgagagagtgagactcatctctaaaaaaaaataaaataaaaagaaakaacttgtttttctaatttcctcgtgtttcccttgttcttgtaggttcctattagtttgtctcctctccagtctttagtgcttctagctttcatattgggttgagtagatcataaaattcattagctttgaatactgtaacagttagaaaactagttggaaagcatgttgaaataaatttgaagtaagaggcttcattttttatatttaatactatattcttctaaaattcacagatacctacatttaatactttactrcttwttcttaaaattaacactgagttttcaccttaatacatctcttaatattttaaattaagtatcattatctatgatttgagaatatggaastgataactccatgacattttgggtaattccgcctttattgtaaattccttacagacttaataccatctttgctataacaaaggaagtaaaatgtatttgttatagaattattgggatggtaaatgagaaagtgtcacaaagccattcctatttaggtcctcctctccttaattctttatgataacatatagatccttggaagtgtcaaaagccttgtactcacaaatgtcattgtttttaattttcattaatgagaagagtaggcactgaaataaggcactgaaaaccttgcttttaaaagtaagatatttgatatcaggcctggatggactggttctttctgtgttttttcttaacatgcgatcccatatgtgtttgcttttctttccaggtttaagagcaggactggctgcctcaattgctgggagttcgattatcaacaaaatgttactggcaaacattgatccttttggtgccacgccgtttattgaccckgatctagattccgtgtaagaaaatgcttttgcaaatattttgtttgggtttttcttgttttttttttttttcaacatgaactgtaacattttaaatgtattacaataaatatggtcccatgtaaaaaaaggatkatcagaaaattacaaaagttgataatgccaagcacattgagtcttttaaaattcagtggtctccgtgatctgtccctgagataggtccttttccagcccgttctctctgagagcaaccctctggcaaaggaaggcaccaataaatagaactgatgctattccctttacctcctttcttctcagtcttgccagatctgtcatctttccacgtcagcttctaggtttacttattttgggaatcttttggcccatactgatctcttcccttcttaagactcctacaattttttggcatttcaagatatactttcttttacttcctttttaaattttgcttttgttatatcatttctgtaatgacattcctcaaggasagtaccatattttaaacgttccaaaacacctggaagaatggattggatctagtacttttttgctcaataaatatttgtccattgttaagtgtagaaatggaggggactttctaatgataaaaaagagagagagagaattggcacctgactgtaaagccttcccataatcacctgcattttttctgtgtagtgaggaacttaagtagaaatagaactaagattttgttacagttagagaaaatcacaccataactgtgtgtcttactcaccatccctttatgtcacatgtaccagaaattgtacacatgtcctgtggttgtacacatggcataggaataggaagtgattagtgctaagttttacaatctgctataaaatgaaagcttaaatggttttaagtactrtcttgtgtacaaattgtaattgttataatgaatctcaaattgactttgatgtacttttccctgtgatcatagagatggatattcagaaaaatgtgtcatgaacaattactttgggattggattagatgcaaaaatttcattagaatttaataataaaagagaggagcaccctgaaaaatgcaggtaattttagtaaaagtaataatgctattacataaaggcaattttttcttcatttattatgtctttttgcttgctctgcctttaaggagtaaataaataaaatttcctgaaattgcctgccaatatttattttcaggagccgaactaaaaacttgatgtggtatggagtccttggaacccgggagttattacagagatcgtacaagaatttagaacaaagggttcaacttgaggtaagttcatcttaaagtaaagatatttcatattatcttacttaaaaaaaatatcgttttggagctaatttgacctaaatgcgttttgattagcaattaaataaatattcaaggggaaaaatgaatgtgattatcaactttgtactaaaggaagtatatacacaggatatgaatgacacacttaattatcatcatcattatctcctgaaattggggctactctggagttgtggtgccccacgtaaaagtggagccaagggagcacatttataggagagggtttttaatggattttctcatttaagcttccaaattctgacccaattctgtaataacaaaagtttttcaaatccctgaaaatagcatttgaagtaaatagaatcttttaatttaaatatacgtttattttttgctccaattatttctaacaacaagtaaaattaaaagagattttgagcatttaaatgttttactgttttttactaatttaaataggaaattaaggacagaaaaagttattttatttcttccaacaacagaaacaacaaggctgaggatatagctctaaaaagactattaatttctgtgaattttattttattttacctttgatccaggactcactgtttatgccgatggggcatgtctttcctatcttgtatctttttgtaactatatatttttaattaaagcatatcatacatatagaaaattatgaaatcttaagtctacagctcaacaaaataaatagaacattattatttggggtgttatccaaacactggaatgtggactaaagaggtgtctcgctcattctttaaaaactatatttcctagtgaagatgagcctattatactttccactctaaacatacaactgtatgatcagctggtttgatttattattgcttataaaattaagatagacttactggataaaaaggtacaaaatcaggaaggttcacattttgtaaatgctatccttgacaccccatacccaggtcagcttaggtgctctcctaatcatgtaatcattcctttttttcttcatrtaccccggttggccacattctttttatttatttatttatttatttttttgagatggagtctcgctctgtcaaccacgctgcagtgtagtggtgygatctcggctcactgcaacctctacctgctgggttcaagcgattcttctgcctcagccttccaagtagctggaactacaggtgcacgccaccacgcccagctaatttttgtattttcagtatacatggggtttcaccatgttggccaggatggtttccatctcttgacctcatggtctgcccgcctcggccttccaaagtgctgggattactggtgtgtgccaccgtgcccagtttggccacacccarggacacataggaagttgtttttatctttgttatccccagtgtttagctcagyactggtcctattttgagggtgaaatagatgggtaagtgatcactttagcacaatttattaagtgctgtgatcaagcatagccagctatctttaagggttgaaaaactggctggatctgaatggctggatggtcttagttcctggaagagcctcagctcttcagaaataggattagtaacctcttgtactggtgttccaaattttgaacaagatatcttatttacacagctgctttgtactctcctttttaaaaggttcttaatcttttttgagttgtaggcacctttggcattctggtgaaaataaagaccccttctcagaatattgttttcaaatgcattatatgaaatacagrcttacaaaagaagacttaccaataagattaaaataaattaacaacatatttttatgttgctaaagaataatatatgtgtttcatcrttaycgtatcaaataaaaatctaatggcatgtctaataaataccataacttcaaagtgatgatgaacttatatacaagatatctgaaacatctataacgtaatataaaaatgtctcatttcgrttgatgatgaaatcacgggtgttactaatgccttttttcccctacatttataattgagggcratgctaaacttcagaggttagtgaacataaagatacagatttttaccatgaagttaacaagtcacctgaatctatccatggactcctggtttctgaaccttaagttaagaacacttgatatagatgtatatgttaaatgataagggaaaataaaatgagtaaaacaagataaatgaaaacatgttaatatacataaaaataaagtagaaaaagtagagcactctttgccatcattaacaaaaaatagtaacaataaagtaaaccaaaaagatacattctacttctaaagacgatggaaggccgttgtctaaaaattcatttttctgatgatggttcactcgggataaaggtggaaaagagagacccacaccttgggaggctctttccagagagacgccttcaccaatggccttcctttttagctttytactcttacctttttcctcagataagttttccctccccgttatgttgttggtatggaacgaggctgacttcatgtcttaactttaaatttgtgcagaacaaagactttgaccttggtttccctatatacgaaattgataaaataatgattttatgcaaatcataaataaatgagcccaaggtactgtaaatcacagtgtgaatgggaaagaactgtacaaatgcaaactttgtttcccaagccacattatcagtgattctgatatatactcaactttcagaaacttggagtgagatttagaatcctttttacaatgatgggaattccagaaatgtaaataacgtcacagtatcatattttgctacttttagagtagaaacacctttcacatgtaaatggaagaattgtattaaaattccaaacattttttgtaagaaggatgacttttttgcccataatatacgtaatttacatgggttaagsagactgttctatttattaactgaaataataattatatattgtttcaagttctgtaagtactaagatacatgaagaaaaacaaataactttaaaaaacagtcttcatctgtaggctataatgaaatatgtgattgagaacaagtagttgtttaattcacatttttagttatttcaaatcttcccataatctgtatctttttaaaaaacaaaataaatttagtttattatattaatagtaatttctgtatttgtttaattcatttcagtaataactagttgtaactactttttaaatcattttgaatgaagtttactgtgtgccttctacataccacctttaattcttaacaactcatgaggtaggtattattattcagttcggaagagtaaaggcattgcttaagttcaaacagctgataagtggaagagccaacatttcaaatccagtgttttttccataagacaatttgtaattataactgaagaaggaaatttactgacttcccacatgtgttctaggtgcttttctttaccttatctcattggcctcactgtgtgctaagaattgttagcccattttacagatgagcaaagtgaagctctraaagcttaagggacttacccaaatactaagtgacagaattcaatccagctccaccatcttccctccatatcagattgtctggtgaaaggagcagagaaaacaaacactaatgagaaatatatatatagctgcagttytgtagcattttgcaacatcatgaaccacaaatagaaacatgggatggctagggagccagctctggtggtgtgcacctataatcccagctacttggaagcctgaggcaggaggattgcttgagcccaggagttcaaractgcagtaagctgtgatggcaccactacattctatcctgagcgacagagcaagaccacatctctcaaaaagaataaataaataaaaataaaggatatatggggctactggaaatattttttaaaaatttaacactcctgaagtttttcctggatatgagaaacttttaaatcatgtgaatttgttaatttgttgaatctgtattcctcgtatttttcctatgagactctatgaaatggacattaagcatttagatttagatgtgttgcttaatatatatatattcacttcagcaccgcacataggacttctttctgaaaatcttcatcgttttccataccatgtttgcaaataaagtgcatccatttggaaaatmtttttaaaatatttcttttatatttacagagatagtatttttccccatttcctttgttagtcatatgatttaaagcagctttttctaaagcacataaagatatctgtttaatgtattgggttgagaaaaagtttattattctgttaagtatttcatatttattcattsaacaaatatacattgagcaccaattatgtgccagacaaacccccaggtgcatggacctttgaatgtgaaaagctaaacctgctaatggttaacactgtgttttcatgaaaaagaagaaaaggaattgtgaaacattcccgtgaaggtaaatcaaccaatcctggccttcatccattacaccattccaatcagccaataaccctgaggtcttcccaagaactgactttggctgaattagcgaacacaagcttctgtgtgattctgatggtgaacattttttgcagtacttggggatgagattaayctcctatgcatcctcactaagctcttattcttccccattctcagattcacagagcagagaagtcccttacgggttggtcttggaccagctgtaacaatttccaagtgtttgctggtctctgccctggattttcaccagtttagcgagctaacttggagaatcagaacctcactactgaatagacattaaagaaaatattggtactcttgacattgagaccttttccttccatctttgctaaacccaaaccatcctagaccagtaggacttaatactctttttaatgagatgtcccattacagaaactctttccctcaccttggtttctcccctagaacaaattattctctcacagtctcagaaatacagtttatttctttctgttggaaatcatttttattgggcattaaaatgtaatttttaagaagctatgttaattatttttaatataagaattatttaatgaaaatatagcatccattttaggtgtgacatctgtaagctsttctcttttaaaatgaaggcttaaacatttccattggatttaaatgttcacttagaaaaatgttaagtggtttggtttaaatgttaattaaaataataagtatgatcataaaatgtatgtaacataattatgctcatttttcttgagtaattyttaaaaaattagtttcataactaattgtttccttaatagccaactagactttatttaaaagttaatagaataaacagcattaattgaaattaagaaacaacatttatgagagaaggtaacagttctgcttctactcagtaagaatttattcacatccattcaccagccatatcctttttttccatttacatggtaatttacttttcatttaagtgcttaatgagaaagtaaggactgcaaggagctttctgagatgcatatatttttgcttgactttggttctkacttgtacttgaagtattcagctttgagtttcaccagtccccaggtggttgtagagccccagcaatgtaccagggactgtgagaggggctaagtgagatggttaggatcaactttctcttacccagtctgctttcaaaaagatgcttaaaataagtacatagaggaccacaatgcaggtgaaagtacataaaaggcctgaaaatgattcaagaaaaggactccctggttttggaggaaagaggtaaagcatttctttaaaaatcagttttttgtaataacttctgctatagttatttatacttcaaactttttttaattaaaaaaaataagataaatgatttggtaacgtgtagagagcagacattacgaacacactgtgctccattgtccttcatctttagtgttttagtatcttccatactagtggttctgctctttttatctaatctctacttttttttttttttttaccttacagtgtgatgggcagtatattcctcttcccagcttgcaaggcatagccgtgttgaacattcccagctatgctggaggcactaacttttggggtggaactaaagaggatgatgtaagtaatgggagtaaatagtttgtttcctcaaaaataattatatcactggaataatttgcttttgtaaatgggctgttgaatagtagtttaatttcatgttaaatattttgcattgggtaagtgaggcatggaatagatttatttaagattttattgtaacagtctcttgtggatgtactccaacttttctcatgttgaagatacagatattcgtatcttgggatgtatgtcacaattttctggatgaacattaaatagtgggtctgcttttggaaagtagatttatgaaataaggaagggaagattttactttttaattttatacctgcatctgttttctatmgctgctataacaagttaacacaaatttagccacctcaaacacatttatcatcttactgttgtatatgatgggagactggcacagtcttactgggctaaaatcaaggtgtcagctgggctgttgccttccggaggctctaagggagactctatttccctgtctttggagcgtctcgaggctgcccacattcccctccatcttcaaagccagcaaaggcaggttgaatccttctcacatggcatctctctgatgtctgctgcttcctcttccacttttgatgaccactgtgattacattgggcccacctagatcacccaggatcatccccatctcaaggccctttatttaatcacatctgcaaagttccttttgctgtgtaaggtaacagattcacgggtttgggggattaggacatggacattttagggggcagagagggggcattattctgcctaccacaataccttttggtacttttactttttctttctttctttctttctttctttctttctttctttctttctttctttctttctttttctttcyttctttccttctttccttctttcyttctttctttctttctttctttctttctttctttctttctttctttctttctttctctttccttctcttctttccttccttccttccttccttccttccttccttccttccttccttctttcttttttgagacagaatcttactctgtcgctcagactggagtgcaatggcgtaatctcagctcgctacaacctctgcctctcaggttcaagcagttcccctgcctcagcctcctgggtagctgggactacaggcacacaccaccacacctggctaatttttgcatttttagtagagacgggggtttcaccatgttggccagggtggtctcgaacttctgacctcaggtgatccacccacctcggcctcccaaagtcctaggattacagggatgagccactgcatccagcctcagkacttttaattttctaaacttgtgtgtgtatatattttttattttcagaaatatcaagagggctcatttggcyggtcgagtttagggctatttttgtttttcttttcatacttttctatattagaaaaagaagaaaacacaaccttacaaatgtaattgttgtgaaaagaatgaaagagagggcacaattattaaagtgtratatatatatatatatatatcagtaaaaatgagaagtgttatcacagtctttatttgaagagtcacatccattgatttgagtttatgatataatgatataatggttcctactgatctgttattctcaaagatcttaaatggacagatagggatacagtataagatcaattggaaagtatttgtaattttcatgacataaatatattccagtcctattcgagtataaaagcatcttttgtctgcttgtcactattaagtattttgaaggggagaaatcagtgagattaaggtaaataaagccaacattccttgaacacctgctaggtagtccgacaatgttctaagagcttcacattcattatttaatgtccacgttgtttatttgatttttactgctgaagaatctaagacaaagtttccagttagtaatagcagagacagggtttaaattcaggcagtataataaaaaaattacaaattacaatgttagcaactttgtgtcctgatattttcagtgaaagttttaattagcttattactttatactgaaaattgtttcagatgcatattatttatgatatagtaaaagagagagtaaggtaatacagcctacatataaaattttagagtaaattaattttgtgaaaatgcatctaatgtaaagacaaaataagtctgcataatttttatcttctgaggtttctatttgcatactctcaagttccctcaaaagttttgtattaaaatataaagcacatatgtatattgcttgtaaaaccttgaaagatttcccttagaatatatcaagtaaactggatcataatttgcatcttcattagctttaactttatgaaactatatcacctttctatgacactatatcgcctttgtagttttttttagatttccaaaacttacatgtatcatcttattaacatgtttgaattaggtatgaacatgtatttaacatgttttattccaaggtgaattatttagaaatatattagttaactggtccaaagagtagtttaatgagaggtatgagtagtatatcmgtgtatatttgaaaaccctttttaaagttaggtttattggaagtcatcttcagagatttttttcttggattattatttcctaataatatttacttaaatatattattaaatatattaaatatatrtagatatatattgcagtttacattgcttaacgtgctcttcacctaaacattcagtagaagtgtaatgtagtttttctttcagatatttgctgcaccatcctttgatgacaagatcctggaagttgtagcaatatttgatagcatgcaaatggcagtttcaagggtcattaaactgcagcatcatcgaatagcccaggttggtttctctcgtcaaacctgactgcacttcttgggctaaggagggttgaaggaatctattctaaacaactcgtacacwggatattcatctataatattctgactttgttgtcatatcagtttttaccatgtcatttataagtgataaagcataatagtctattctgtagaatagtctaatactcaagccttcataaagattgagtgtcattttctctggatgatttgtactctaaaatgatttgttttatttcagtgccgtacagtgaaaatcactatatttggtgacgaaggagtcccagtgcaagtggatggtgaagcgtgggttcagcctccagggattatcaaaattgtgcacaaaaacagagcacaaatgctaacaagggacagagtatgtaacaaaaacattcttctagaatattgtcaggtttttaaagaatctgaaattgttataaaaaaatagaaaatgaaaacatttaaattgtctcttaaatctgacatttaggtcatggtggtttgaaatatgaacaaatatttatttatttcagtaggagtttattttttagagccattttaggtttacagaaaaactgggcagaaagtaaagagaattcgaattacrttcctatatacttcctcctcccccttcttccctacacatgtaaattcccctgttaacatcttgcattagtgtggcacatttgttacaactgttgagtcaatactgattgattattattaactaaagtccatagkttccattactctttgagttgtacatctgtgagtttggacaaagatataatcacttgtatccaccactgcagtatcatacaaaattatttcacgaccctaaaaattccttatggtctacctgttcatccctccttcccttacccttactcctggcaatcattgatttttttttttttttttttactgtctctattatttttccttttgcagaatatgtttttaattaaggtctgtctttatcaaagaagactgctaatatttgcccatctagtatatataaaatagtaaagattaaagaataaattgaagcaatagtaaagattgaagcatgaaatatttttttgtttttgtttttgttttgaaacagtcctgcttcattgcacatgctggagtacagtggtgtgatcatagctcactgcaaccttaaactcctgggctcaagcaatcctcctacctcagcccagctaattaaaaaaaaaatcttttttgtagagatgaggtctyactatgttgcctagactggcctcaggtgattgtcccgccttgacctaaatctcttttttaacttttaaatgatgtattcatgatcattgactgcactacttttcatgtgttgcagtacattggaaaactttgaaatgtcttttttatacttgtgatttatttgaggagtcattagagaaaaagcaattgtagttttattaaagcacacatttacatggacctctgagttctaaactaacaattcgttacaatattgactttaaataggcctttgagagcactctgaaatcttgggaagataagcagaagtgtgattctggtaaaccagttctccgaacccatttgtacatccatcacgccattgacttggcaacagaagaggtgtcgcagatgcagctatgctcccaggctgcagaggagctcattactaggtagggggctctgctgacttttcaggctgtgggaactgtggtctcagccaatttttgtttttttaatcttaatacattgtttcagtagtggtatcaaaaagagatgcaattactcttcttcacacagcactctttccattattgkttatttctccattttatatacatctttacactatactacctacttatatgttgccttctaattactaattaaatgtttatggaatggagagggaagtctaaacattcatcctgttccagagaagagtcaggagcaaaaagaataaaaagacttcaaaaaccaatttctgacaagttattagagagattttgagaccacacataacattaattccaatagacaaaaagaaaagagataaaaagcaagcctatgagtgttaaacaaataaaaatcactatgaccagggaaaacttcagaggggaggagggaccatgggccagtgtcttacctcctcacctgagtcttatctaccgaatggggctaataagagctgtttcaatagggtgtgtgaagattaaatgagactctagggatgagtcctataagcacattgtattagtccattttcatatggctatgaagaaatacctgagaccgggtaatttataaagaaaaacaggtttcaggccaggcacagtggctcatgcctgtaatcccaacactttgggaggctgaggcaggtggatcagttgaggtcaggagttcgagaccagcctggccaacatggtgaaaccccgtctctactaaaaatacaaaaatttgccgtgtgtggtggtgggcacctgcagtcccagttcctcaggaggctgaggcaggagaatcacttgaacctgagtggtggaagttgcagtgagccaagatcacgccactgcactgcagcctggacgacagagtgagactccgtcttcaaaaaaagaagaaaaaaaagaggtttaatagactcacagctccacatgtctggggaggcctcacaatcatggcagcaggcaaaggaggagcaaaggcacgtcttacatggcagtaggcaagagagcatgtgcaagggaactgccctttataaagccatcacatcttgtgagacttagtcactatcacgagaacagtacaggaaaawctcacccccatgattcagttacctcccactggtctctctcatgattcatagggattatgggagctacaattcaagatgagatttgggtggggacacagccaaacgatatgacacatcatgtctggcatattgagtgctctgtgtatagtaacttaagattcttcccacaccttcatctggtcactgataaaaatgttgaaaaagaaaagaaggaaagcaaagctcagtggtttcagcggctaactcacatctttcctcctctctactatttgccatctgctcccctcccattccttactctctttaaatatttattagataactagactgtgtgagatgttagagacagaagagaaaaggcatacaccccctactgctggaccaacattcagaattagaatcaagtcttacaactgcaaaatactgggcagctcagaagaaagggaagagaaaatgaatatttactcagctatacccacacagctgcattattgtacatctcggcttcttatccatagggttgttagtttcagactaaatacatctcttttagatactacagacaacttctgtggcctctaatttacagtgtttttttgaaaccaaaatatacttcccatgttctcatcctgtgaaccarccaaataatcttattgtaaaaaggaagcgaagattgactaggcttgcttctgrtcaacgtagtttggcttcccatctgtttttaaattttgcagatgaaatcaggctcacttgtctattttcagaatttattcattgactatgcaaacatattcaatttttgaacctcttcttaggctggggatacaagatgattatttgacagccctacttaattggctcacagattagtaggagggagaaatgtggccaaaggattgacatgaggcacacagtggactctgtagatacactctagaggaagtcagaggcagtgaaggagggctgcctggaagaagtgacctttcatccgagtcttgarggaagagtgagaaaaggagcaatttaagcatgggaaccagcttaggaagaggcccagaggagtgtgaatgcatgctactttcaggaaatctcagagagtttggggtgactgaaaggttggcatagtatatgcaagattgtgtggaatgtagatgaagaggtgaggaggagccagatctttactgggctgttctagaagtagtgtggaggggtttttctggacgacagcaaagctggggcaaggtgaacactgaggatgctgtagaagttgtccctataaaaaatgatagactaaagcagtaaagatagaaaggacaagcaagattaaagacagtttaggatttaaaattggtaaatgggyatgaattaggaaacaggttgaccttaatgttctaatgaatggctggatgattgtggggtgcctttgatggagccatagggttcaggaagaggagtaggtattagaaggaaaatgatgggttccatgttgggctttagaatttaaattacattaaaaatacctagcagatttcagtaggcaattagaaatgttgatctgaagttgatttaygtctttccctttctctgaaaattagaataacctttatccatctctgttcttctgaaaaatagcccattcttcatggtttctcagggttgctgataatagtgctgaggtgacatttgcaagcttctttgtgccttagatatccattgtataatccttaagaattaaattctttttctttactcttggttcagctatatagggcctcagtcccttttcttgttctgtcctttccagatagaaaatatttctccrtgaagctgtcagaagcaaaaaaaacacttgaacagccctgccttcttgctcatctgcaggtcttacatcattttctagcaatcggagggactttttctcctttcttgtccttggccttagtgccttccagaatttggtcttttcaggactattcttagaggtttggataccagtggagtatggcacaacaggctttggagttaaatagacatggattccgatcctggctctacgatttactrgctctgtatgcctaccacgtctctctgagcctcaatgtcatcatcaataatatggagatagtaaatcatagctacatttaaaggctgtgaatgttaacttatatactgcttatgatcactttgtgtattgatgacaaatatggtaatgctyttccctaatctgttgcatttgcagtttcaatgratgaaagagaagtttctagtctttatacttgtgatccctctcactttccaaggatactgmaaaatgaagtattactatatttcattcttcaaaatagcacttcaatatgtctccctctgatttttaagcctaattttttatacaaagattttttatttcatattttttgttgcagtggggtctggatttatagatctacctgtgccattcataattgagcagccattaaaagtgttcttccatactgatcttcatatattttttacttgttttatcctaacatttctatacttcaaaaaaaatgagcaatactcaaaaaagttttttattcatttgtttcatttttgcttttaggatatgtgacgcagccacaattcactgtcttttggagcaagaactggcccatgctgtgaatgcctgctcccatgccctgaataaagccaacccaaggtgcccggaggtgaggatctaatggtaaattctcattccacagattcttttgggtgttacacatgtattttaatactgtaaaatatgccacgccctgtgacagaaagttatgttgtctatatgagtctctacaaacctgcagtaaaatcgtggacaactttttattttccttttcctgttattttttcattcctgctcttaaattctctcattttttatgtttcactttcaatcacttgtcaccttccatctgtcttcacttctttcttttttgaactttaatcgtcctttcttactccttcttttaccttaccttctgccctgtaccttgttaaagggcaatcctagatatcatcagcgtgcattttgttagagatgtccactcgtttttgaagttatgcactgaaattattcctacttcattttgttttgctaaatcggaaattgatgcttctgtaaaatttttaatgtataagttaataatagaatggatagaatataactcttaaaatgtgccacatggtacaatgctatagtatggagaaaactgatagcrtttttttttttaattatttgattgaagttacttaaattaatatacagttaagtgcttgttctcaagataatrgtctaaaaagcaatatggttagtgttactgagagtaaaagttttttttgacttaactttttaatgggaatatgtatatgctggtgctagcatatacatattcattaggtaggagatgtgatcctgagtgtattcactgtaatcggtgcattctttttgttctgtaatataataataatgagatagtcatacaaacaaatgtatgaaactttgcgattatagaattttggtagattaaaamtgtgtgctgtgaatttaaattataagaataaaatttaaagtgtttatggtaatgaaatcctattttaatacagatcacatgtctttgatattcttcttttctagagtcttacaagagacactgccactgaaatagccatcaatgtgaaggcgctgtataatgaaacagaatctttgctagttggcagggttcctttggtaaggaaaagaatgactggtaacataagaatgatgaattaaatgtctgggtcttaccttcattggggaacaggcatttggcagattctaaggcagaagcagccttctggcttccatcctgagagctgcctcttcacctggtttttgtcttcaagaaaatatatggctgaagttgggagtcatgattcaggctaacaggagtggagatttcccctcatatatgccatcctgtttttaggsagccstgctctgccccattcagcttcgagagacgtgagctttataaagtgtagtagacattccttaggtacttattattgcacacaagtagaggaactcatggagtttgttccctgaattagcatttgaatatgastggtatggtcctccaggtttgcttaaaagaggacattttctagacacagtgtttcaagaagtaaatttcaagaactctgccttgtttaatccagattggtcctggaaatcaagtttaggccaagtctgaatcagaccacagtccatggatctcaagcataaatgctggaagcttgtggatgtcctattttgttagcagcacgagttagcctttctttataaatacctcaccattttcaagtattctagcatcttggctcttgccgccacctagagttcrgttgtggcttattcccacatgctgttatcactgtgtggaaggcctaattcatttgctgtttttttattcctttttataattctggttaattggtagttgatgatcttaaaacatttcttttgaaagtaattttctcacttggttgggcaaatctacacctaaataaaagtgatactaagagtcatagtatctggcacagtgggtgaatgaatgggaggtgcatcccacagccttgctattaagtgcctgagcttagggtttctgttttcgcctatggtccagaaaagtgccacctttggggcatcctttgctctgagaagagaagctgaaaggctgcatgaaagccatcrctcttacctacctccaaaggaaactgaaacacagcttccttgggacaagaggtgactggctctactatggccatgaagaaaaccttttacgaagaaacattggttatctcttttgataaaaccagtggagccccttcttggctttttttggcactactgtttttaaccagaatcttctgctggtcctataggaaatccagtgacctatgacgatcatttcttacaactaaaagcataatttattctgtacttattttctctacacgaaaagtacctgctgagtgctaccttgctaatatttattatttgtattatgttaatatggatggactttccttctccacttttaattttctctcattgttaaatatgaattttggtttaaaatgtgtactggtgaattttaccaaaacttttgacaatagtgatattacaataaggaattgattgtatttgagagcaactaaggtttactctatattttagtgccagaatgaatttgtaataaccattttatacgttttataacacatattcttagactaaacgaaaattaataaattttaaacacaacagggtagagaatctcctttttttttgagacagggacgcactctgtcgcagtagcgtgatctctgctcactgcaacctcagcctctctggttccaagtgattctcctgcctcagctgccaagtagctgggactacaatcgcgcaccaccatgcctggcaatttttttttttcttttcaatagagacagaatttcactrtgttggccaggctggtctcgaactcctgacttcaagtgatccacccgtctcggcctcccagagtgctgggattacaggcatgagccactgcgcccagccaagaatctccrtatttttaaycactactagaagtggtagatactgtgartaacaaggggaaacaaaaaaaaaagttcataataacagtaatattatctctgaacttttagttctaaaattctataaacatatttatgagaactctataattttaaagtaatttataaatatattgattagctagaagagacctcaaaaataatctagtcggccaggctcagtggctcacgcctgtaattccggcactttgggaggctgaggcaggcagctcattgtagaccaggagtttgagaccagcctggacaacatggtgaaaccccatctctactaaaaatacaaaaattagccaggcctggtggcatgcgcctgtaaacccagctactttggtggctgaggcacgagaattgcttgaacccagaaggccaaggttacagtgagctgagattgcgccattgcacttccagcctgggcaacagaacaagactctgtctcaaatcatcatcatcatcatcatcatcaccttgtgctatttccagaggaagaaataaagtctcctgaagtcaattaaccttcctttggttacttagttaattacaaggccaggagtagaatccaatcgactgccttccagttctgtgcagaggaatgtttatttaatctttattcatttattgaacttgtaagtgcattttaatacctgctttcaatgagttaatgcagataataggtgagcagttaaattctccttaaaatatccaaacccagtttcagatgataagccattgagctttttgctttgccctaatttttacaacagtttttcatcacagatttttctaagattcatgattttttacccttaagcctattctttaaattttcaaggagatttttctgcagttctttttatatgacaagtttttaaccagtttaaaaagtattatttgttcaygtggtgacttttttttttttttttttttgagtcagagtttctggctctggcacccaggctggagtgcagtggcgctatctctgctcactgcaatctccacttcccaggctcaagcaattctcttgcctcagcctcccaaggagctgggattacaggcgcccaacaccatgcctaactaatttttgtatttttagtagaggcggggtttcatcatgttggccagtctggtttccaactcctgacctcaaatgatccgcccacattggcctcccaaagtgctgggattatgggcatgagctatcatgcccagcctggtgacctatttaaatcagaaggatttttggcacaaataagtagaatagtaagactgcacacttatacaaccaggaagaattggtagataaatgcttggaaagcatgaaggagggagacaggaaagaagacatttacacagaaaaaaacaccaaaataatacttttkctatgaagttattaaagttacactagctactcatatgatctttgggaagtaatgattagattaaatctattcagattttttwaaaatgaaatcaatataaaagaatttattcttctcttaatattccttaatttaaaaaatactaccttaataaggagtgaggctgttcactgtcaaagtacaatkatttattctacgtgaggctggccactgagtcttgttttgttttgtcttttaatctgctggtaaatagcagctggaatcgccacatgaagagcgagtatccaatgccttacactctgtggaggtggaattacagaaactgacagagattccttggctttattatatcttacacccaaatgargatgaggtatgtaaaattcagcctgtttctctagaaatgtagaccatattgctatagaatttgaactcatctttgaaaaagagatatttagggaaaaatgaattttgaatactactttcaaatgttctgtkcttgaacaaatgagaaaaggcatttatgtgaacgcattttaggggaattgggacatttttagtagtacattgtgaactttttttgaagaagttatcactgttctataatgtttagtgtttataacttattcctgtgttatccctattatcagagtatccttttcatatcctgaaaaaattattttcttgctcgatttgaacaggaacctcctatggattgcaccaaaaggaacaacagaagcaccgtatttcgaatagtgccaaagtttaaaaaggaaaaggttcagaagcagaagacaagttcacagcctggtaggtggtycatatggaaggggaaatataacattatgaaaaaagagctgattaaagtgacatcatggaggtcrtgaaaatgttctggagctagatggtggttgagcattgtgcagtatgatgaacatactgtcattgaattctatgctttaaaatggttaaaatggggaatttcatgctttatgaattttaccataaaagaatcctctcatacctaaaacacrtctgagtatcagtgggaatctctagtaaggaagcacacaaaaaaatgaagtggttgctaatttgcttctactttgtttagtggatgtcagcatttctgttcagatggttctttctcaacagcaagtcaaagcatcagtgtataatttgtttttcttcttttaagtacaatttttagattactttgataaatggaacatagaaactttcatttactcatttaacttgccgattayattttccacctaaagttatatattccctttctcctgttttgaggacactgtttcaacccctcgacaatgacaatatgctgtgatacttgcattctcaagcaaagattaagccccctcttcgctgctatttctctcgttcctttttcacctttccttagagtttaaatgtacaggtatgctagtactaaagcaccttcaaattctgtttatacaatggtagctgcctttcataaccaaataattttataaattcctctgagtgtgctatctttaaaaaagtgatgtaaagccttatttgtgatattcataaagcagctaatgaaagccatttaaaaaccaaatacagcaaataagtaggcttttattaagctaatcaatgttgaataaaatgtataagcaaatgatacacactgaaaataacgtaatccaactaatgtcagagagcagtgctatggactttttaaatgatattaaattgtgatttaatagcacattgattgccgttattatcagtagtaggagaatcaatcaacactacacttgaagtcagcaagaccttaagcagaaaagtctgtgtaaaattgaataccccatatcagattttaaattgtaattagcatttgtagctcatttcagtctatagccgttttcatacagggtctgaaggaaatcatcagagcttatttagagcttgcaccattgatcctaatgatgtgaaatacattttgtatgcatattgtgtaggttgggtggctttaatgaggaaactggactaaagctaagcatgggtgcacrgcagcaaatggttttgtatagtcggatccttgtgttgatagtgtgtaacttgcatgggaaaaagtggaactatggttttgttgaaacaacacctttaaccttttcttttgctagcactgccgctgcactctgttttgcatcttctttggccaacctttgctttgtaatgcattgagcatgtagaaattaagggggttttgctcttaactttggtagttcagaaatggggcacagaggaagttgctgcttggctggatctgctcaatttgggagagtacaaagatatcttcatccgtcatgacatcagaggggctgaacttttgcatctggaaaggcgagatcttaaggtatttcctttgtgctcttctgttcttgaaaattttattgcaaaacagaatcctttctcctgtgcctcttctgatacttgcttttagcttcgcttatgtcatgcaaatgtgtagtaacctaacattcactgtcctgtggtctgagtttcttgtatgctttttaacaagaatgtcagcagtattttcctgtcagaatcactctattatagctaaagcttagcatgaacttagtaatttttctctgcatctagtgatatgactgttgctgtgctagtatttccaaatggatcatgtttccatcagctcattttattgcatcagcatggaaggtgataatttggctgaaaatgactaaaatctaatatatggttaacaactaaaaattaatgcaaaataccaataacaaagcctttctaacatatggaatgagaagagagacttacagcaatggctacttagartcttacaatttgttgtatttctaagtcagccttttttaggtcacatgaataactagactgagaaattcaaatttcctttctatgacatattattaaaattctatyattctcaaaaagaattttttttctktagkaaacgaggtaaaaattttgcctagcttttgctagaaaacagctcagagcctatttgtgaattgacgatagagaaaaccattccttcatcacctgaggcatttcccttttattctgtgggtgaagtctcagtagtagtagaaacagctgaagtaggctctctggccaaggtttaggagtaggattttgtcacgttgtattttcttaccacatattgccattttaaatttccaataagtagtaacrtttgttggagtgatccctttcatgtagaccaagttctaaaatgcattaaattttatcataatacagagaattcctaacaaattaatgaactgttgttgcacctttatctacaaatacattagcaaagatctttgaatagataattggtagtataaagatctttattaaacagattcacaaagagttttagcacatcaaaagatgacaccacttatacctaaacaactttagccataataaaataaaataattaattaattaccttagttgagagtcctaaatctggaacatagcaaaatatgtagtattagagttcataaagcaaaagttggcttccaagcttgaaatgagyccacaaaaaagtaaatgtaggggggatcatgatatccaacatgtttttgtaacttctgatatccttggcagataccaatatttattaatgactgattaatatattatgctagcttctctgcatgatacctgtcctctagaagcatgcaccgcatttgctgtgaataagcatacattcagggaaaagactgtgtgtgtatgtataaaaaatatacatacataaatgcatatatgtgtaygtgttatatatatacatacaaacatagatatatacaggtacacacacaatgaatgtagcagaatgaatgtgtagaatggaaaaacatacactaaggcaaagttagaaaagaatagaaagaagatggttaagaattatcttagaaaacgttctttttgcttttyatgggacttttttgttctgttttgtttttatttttaatgcaaattacattctctctcttaaaacttttagacatttgtattgacatggattttaaaaattgtattaggtctgaaacaagatgtggggggtggatgagaaaaggaacatttcacagaaagagtcttctgtagcacaaaatcataaagctagagaagagctcccattgttctctgcrgttgtagctgtcagcagcggcaagtccttcagaccgatgcctctaaatgctggtgagggatcactcactccttaggtactccattgcttccggtactacttgtgaatatgtcagtggcacacaggttctctctcagccctgcctgacctgatttgtgaacttttggattatagcaccaaccggctacttggtactcaggtattatacagggatatcaatctctgtttttgctttttaaaaattaatttatttttatttatacaaaaatatatgggtacagctgggcacggtggctcactcctataatcccagcactttgggagtccgaggcgggcggatcacgaggtcaggagatcgagaccatctggctaacacaatgaaaccccatctctactaaaactacaaaaaaactagcyaggtgtggtggcacgctcctatagtttcagctactcaggaggctgaggcaggcraatttcttgaatmcagaaggcagaggttgcagtgagccgagatcacgccactgcactccagcttgggcgacagagcaagactctgtctccaaaaatgaatatatatatatatggatacaagtgcaattttattaccttcatagtggttaagtcagggcttttacggaatccattgcctsaataacatatattgtacccaataagcaatttcttatccactccctcccactcccttacccctccaagtctccattgtctatcattccactaggtccttgtatataccttatttaacaccsacttatgagtgagaacatgcaatgtttgtcttcccgtgtcttcttgtttcatttaagataatgacctcaagttccatccaagttgctgcaaaagacatgttttcattcttttttaaaatttattttctatggctgaataatattccaatgtatatatgtgccacattttctttatgcagtcatccattgatggaaacctaggttagagaatttcaatcttaacatgtccaaaagcaactcttgagctcctattgcactcctgttctgccccttctccagtgctctgcattttataaatcagatctctggccctccaggcactctaggcagagaaatgaggctcatacttagcaccttcctcttttttgtccatcttcccctaacccatcaagcccatcaccaagtcatattgattctaatgtccattcacttctctttatatcctgtccacaatcctgctccatgctactgtccagttttgcttgtataagatcaatagcttcctaactggtctttccgctgccactstgtcttcacagtccattatccacgttgcaaccagagtgttattttagcatcatcaatcaggtgtacacttttctgcttaaaacttttcagtagcttcccatttctagggaataaaaactcacatctttatgcaggcctacaaggttctgcctatgtattcaacctcctgtgaagyctggctcctccctgggctatgctccattcatcctggccttatttcagttgcttaaaaattctatactttttctcaccttggggatgtactctcttttgctgtgcttcttcccctacccttcacctggttaactcctgctcagagattagctcaagtgttactcccatatcaccaaaacaactagacatagtaacatgacagtctaaagttgggaaaaggaaaaaaaawatatatatatatatacatatatttgttgttgttgttgagatagactctcattctgtcacccaggatggagtgcagtaatgcaatcatggctcactgcagcctcaacctcctgagctcaggtgaccctcccgcctcagcctcctgaatagctaggactacatgtgcatgccgtcacacccaactaatatcttttattttttgtagagacagggtcttgctgtgttgtccaggctggtcttgaactcctggcctcaagagatcggcctgccttggcctcctacaatgctgggattactggtgtgagccaccatgcccagccaggaaagtatttccaatgtgctttagcagataaggaaacaaactgattgcatcattttctttgctagaacacagtaggagaaaaaagagacaccaaagaaaatggtaaacatatggtgagagttttttgtttagtttattttttgttttttctatttggaaagttgtgtatgtatggctggaaggataactgaatatctacaaagcatgctttgtcaaaatttggactgtttatccagggaaagagaaagctactcatatgataaaaactggccaggcgaggtggcttatccctgtaatcccagcactttgggaggccaaggcaggtggatcatgaggtcaagagttcaagaccagcctgaccaacatggtgaaaccacatctctactaaaaatacaaaaattagctgggcatggtggtgcatgcctgtagtcccagctactcgggaggctgaggcaggaggatcgcttgaacccgggaggtggaggttgcagtgagctgagatcatgccactgcactccagcctgagtgacagattgagactctgtctcaaaaaaaaaaaaaaagaatatgataaaaattaatatataatgatatgtgataaaaataaagatakaacaaatgtcacagcatagctttattacagcctataccctcaaaggcataaaaatattgaactcaaactaaaacgtcaaaagcaattgcaacaaaagccaaaattgacaaatgggatctaattacactaaagagcttctgcacagcaaaagaaactataatcagagcgaacagacaacctacagaatgggagaaaatttttgcaatctgtccatctgaacaaaggtctaatatccagaatctacaaggaacttaaacaaatttacaagaaaaaaaacaacccccattaaaaagtgagcaaaggacatgaacagacatttttcaaaagaagacatgtggccaacaaacatatgaaaaaaaagttcaacatcagtgatcattagagaagtgcaaatcaaaacctcaatgagatactatctcacactagtcagaacggcaattgttaaaaagtcaagaagcaacaggtgctggtgaggctgtggagaaataggaaagcttttacactgttggtgggaatgtaaattagttcaatcattgtggaaaacagtgtggcaatccctcaaagacctagaacccgaaataccatttgacccagtaatcccattactgggtatatacccacaggaatataaatcattgtattataaagatacatgcacacatatgttcattgcagcactgttaacaatagcaaagacatggaatcaacccaattgcccatcagttgtagactggataggccgggtgtggtggctcaggcctgtaatcccagcactttgggaggctgaggcaggtggatcacgaggtcaggcattcgatatcagcctgggcaacatagtgaaaccctgtctctactaaaaatagaaaaaaaattagctgagcatggtggcaggtgcctgtaatcccagctacttgagaggctgaggcaggagaatcgtttgaacctgggaagcagaggttgcagtgagccgagatcacgccattgcactccagcccaggcgacagtatgagactctgtctcaaaaaaaaaaaaaaatagtagactggataaagaaaatgtggtgtatatatacaccatggaatactatgcagccataaaaaggaactggatcatgtcctttgcagggacatggatggagctggaagtcattgtcctcagtaaactaacacaggaacagaaaatcaaacaccacacgttcttataagtgggagctaaacaatgagaacacatagacacagggaggggaacaacatacactgggtcctgttgtgggggcagaaggaggggagaatatcaggataaatagctaatgcctgtggggcttactacctaggtgatgagttgataggtgcagcaaactaccatggcacacttttacctatgtaacaaacctgcacatcctgcacatgtatcctggaacttaaaattaaattaatttaaaaaaaagtatagctaagaagttaatgtaattctatggaaaacattcttctcattttataccaaaatagtaattctaaatagattctacctcccccaaagaagatttagtcttgagaatacaatgtatttatggcctaaaataaaatatttaatatttaaatatattttgtagttgcatacctatgttttcacaaagtgtaaagatatttaaatattccactcaaaaaatctaaatgtgactrtaaacgcatgtacatttcaaatttaggtagcaagcatcggtatattcctctaggatttggccttgcttttaagcttgatacttttgcacgtattcaggaaatgtatagttgccttaggactaattttggatgccctgtgtcataggagaaaatatttttctgagtcagttaaatatttatgaaatatcttgaaattatctcaagtttgacaatagcattggctatggaaagagtattttccagaaggattcattactgctaaagaactccaagagctcttaaagggtaaacgrgagaaagagagagacaatgaccgaagacttaaaccagtttgatctatttcattcaaaagttgaaaaataaataaattataaaacagggtggatatttggaatctttaacttctcagacaggttattttataaccctgttttttaggccattttggaagtcatctttttaataattttcaaatatttcaatttttttggaagaagttgtttgacttcacatattagcaaactgactatgccttttacttaaagaaactaggatttggaggccttaactgtttcttttagtttttcagacagtgaataactagcagttattcacccttggataggtttaatttattcctgcaacaaatatttgcaargtacttgctgtgcacactctgcagtcatcatctatttctgaaagttaaatattgaattcttggcacttataagaagaagtttctttaagaagcaagaataataattttgagagaaaagagccaatagtgttttgagggaaagcatcaaccaacagataattatgtttaagtaattttttacacacatacattacaaagtataaagactaattaaattaaatattcctctcaaattgaagccttgtaatgcaactgcaaatgcatttacagtccaaatttatgtagcagatactggtatctttctctagaattaggtctcacttttaaatttaatattttagcacaagaaatgttgccttaggactaattgtgggtgccctgctgtcccgcatcatttttttctcagagatcccaaaagagcctttgagagagagagagagagagggagagagagaagaaaaagaaagaaaagaaagaaagaagaaagggagagaaagaaagagaaaagaaagagagagatgaaataaagaaagaaagaaaagaaagaaagagaaagaaagaaactaaattggttttgacttttgaagtcaaaagccactgtgtataattatgagaatgtcacagttaagagtttatgtagaatgtgatttttttttgtaccagttgggaattctttggtgtcaggttatttttgttttatgaacttatttttctagctttcacttcctgaatcactgaatataaactaaaatgaatgaactgaatgctaattatgtttcttsctggttaaatatttaatccccaattttctrttttcaataaacttttttccttttctttcatttttaaaattttctttctgtgttttttctttcatttttaattatttctacctttttctgttcttttattttaggatctggggataccgaaagtgggtcatgygaagcgaattctccagggaattaaagagcttggaaggagcactccacagtcggaggtgtaatcatattggtgctattycttggaagagaagttattgccacttaatacaaagtccttggaagcaagtggctgttcttgtagttttctgcatagataagtaagcaccactgaagcacctctgtggcttgatattttgctgtgggtgaaattttgatttgaggtattagaaaatatttttgtgccgaacaatacattccacaaagccattttctttttgtgcaaacctgacatgttcaaatatattcacaatggtaataaggtaggaggaatctgagacgattgcattgtctaaacagtggaattgcaaaatgtttactttccatagatctggtctgatggaatgttcctactgtgcaactgcataacaatatgtggttaaaacttcctaggtttcattacgggggggcattggccattttcttaaaatcataggttaggagactaaaatataaattaagttgtgatttgaatgtagattggtatcacctccaactcctagtgcttagtggtcaaatatgttgaaaacctttccaatactatgaatgaatgcaaatcttaatgcacgatgttcctgcctgaaatgtctttctttttcttgcatgtcacatctaatactgtaacactttaaatagctttcatgtcagttttaatgttaatgggatttaatttattactaaagtacatttttgttggytaagggcactgcacttttctgttttttaatgtgggattttgcgtaaatattctgtacctaagactttgtgaaagtgtgtytgtgccataatcaacaaatgatatacatcacatgcaagtcaattttatttcaatctatcataagcagtaggcrtgcacgttaagaaaattctctggatattttcataaaattacatgctcccttacctgacaaaacttgttacagctttccaaaccaaaatttccacattttgtttctaatttttaatttcaatttaataattatttaatattctatttgaatttataatatagtaaagtgttgatatccaggaattccctgaggtgtcaactgagatttatatactgacagataacccagactcacccgctctctacagtgacttctgacacgatcttccaaacagaagggatttaaattttttcttaagggctttatgttgttattattattatctcacttaattcttaattcttatcaggtggatattattttcctttttctaaaccactgtacttcagtgtagcttattattagaagtcaacattacaatgatcaaatctttgaaagccaaaggcatacgtatcaaaaagtcacaaaaatatccttaaataagctttctttagccattatataccaaaacattaattataatattttaaaatttgtatataagagaaataaacagggtactgactcagtggtgacaatttttatgaagtagcctgctaggtgcttaatagatatatatacacacagatatatacatatacacatatatgtgtatatatacatacatacacatatacatttatatgtgtatatatatacctacatacatataaccttgtgatatggcatcattgatattttctagacaattatttccccagtgtttaaagagaaatactaataggcgagcatttaaaatgaactattgtcaggcatattatttaattayatcaaaggagtttaactgtttgacactttactcttgtttataacttgggtatttaactactagtaaaaatcacaaaattttaatgtctttaaaataaatgaccctgagggattcctgaccaagtatgtctgactatatattttacctaagttgtaaataaatggaaattttccaaagacagttatatcaagtagtttaaaaagtcatgaggcagggtgctgtggctcacgcctgtaatcccagcacttcgggaggtttaggtgggtagatcaccggaggtcaggagttcgagaccagcctgaccagtgtatgaaaccccatctctactaaaaatacaaaaattagccgggtgtggtggcacgcacctgtaatcccagctactygggaggctgaggcaggagaattgcttgaacccaggagatggaggttgcagtgagctgagatcacaccactgcactctactagcctgggtgacagagcaagactcccatctcaatctcaaaaaaaaatagtcatgaattatgcaattattctaattgtatctgcacttacgaagtcagaggtctcctttttcagtccctctgatagtmccacctaagtgctgtcctgctcctgtgaacactttcctgtgcaaccaaacaggaggtgccaggttcccagaactctctaacattacagatctctgtccatctttactaaaaaaaggaaatgtgagggaaagaaggggaagaactctagcataaataatgtattaatataaatatctatattgattttcaccccccattcccctttgctaatagaaaagagtctagctatgatgtgtcccaaatttaagagtgtgatgtgaaggactgaatttttgtttgttcgtttggtgagcttttcactcgtaggtgacatcttttgtatatgctgtaaagtctcagttaatggaatcctacagtgcatttctggctagctcggttggtagagcgtgagtctcttaatggaatccttaattagctagaattttcctgcaaatggctttggatgagggaaattctataaaatgacaatttggatatactttttgttaaatgagagcaattttctctgtatgctttgtctatgcatggctgtgcagggcccaaatgacttcactgacacctgtttccaggagggggtcttcagagcctccttaggctcttgtcagtmtcataaataattcctcttcttatagcggatggggttaccaaaaaaaataaaaagtagggaagagcttctccatgggatcagatcacagctttggggagtgggatggggcctctatgctttgatctatgcatgagctggggtgagaagttcccacctgcacctgactgcaatgactgtaatggctggaattgtcacctcttctccctgataggctcttcctcacctggaggatcrgggctggtgggagggcagggaaggggaggccatcagccagaatgtattttctttcagttccatttcctgaggaagaacttgcttttaaagsaggaaagggacagaatcagacctaaataaaattcctgagtatgcaatatttctctttagtgtctcttcacctccctttctgagtttctttcctacatcctggctcttcattttcccaatgcccaatataatcatggttgctgaaattctcactgccttctactttcctttccccatcaattaacccactacaaaatgacccctttcatttctcgcttaagcatacatggtgggtcatttaactaagtgttaggaagaaaacaatttaaagacactaattttacagtttgcgttctgtaaaaggatacttgctggataatctaagtgaattgatggattaggtcatttgggattgtgatatatattgttcttgctgacaagaaatgacccatgaatgtctagatctatcctgtccaatattgtagctacatgtggctatctaaatttaaatgtaatttaattaagccaggcataatggcacaagcctgtaattccggtgactcaggaggcttaggagggaagatggcttcaggccaggagtttgagaccagcctcggcaacatagtgagaccctgtctctgaaaaaaaatttttttaactagctaggcatggtggcatgcgcctgtagtcccagctattstgaaggctgaggtgggaggattgcttgagaccaggagttcaaggctgcagtgagccatgatcatgctactgccctccagcctgggcagcagagcaagacccctactctttaaaaaaattaatttaattagaaactccatttctcagttgcactaactacatttcaagtgttcagtaaccatagtggacagtgcagatgtagaaaatttccatcactgcaaaaattctattggacagcactggygcagatcattgctactcaaaatgtgatccatgggccagcagcatcaatattacctgggagcttacagaaatgcagaatttcaggcccactgcagatctaccgaatcaaaatcttcctttagcaaaatttctcaaacgattagcactggcctacatccattttatccttccttagctattagggatgtgaggtccgagggcttcaaaaggtccccggaatagcttgttccttcatccactgtgtcctattcattcttcagctaactccagcaatgagctgaaactcattcatcacccttgctgagttttcttctcaatccttattcctaattctggttctagatgagccctacctacccagtggttgtatttttgtagccagtgtgggacacaggagattggcagaccaacacagctagcctctctctagccctccctccacctctaagtcactaacaatccatgtttgttcagtttgttgacatgtggcatgttcatttgttcacaacttaatcacgggggacatttcagaaaaatgtgtactaagttaaaaccatgtttagtctcctacaacttgtacattttcattttctcttatcagtagattgtccttgttgacatagctcatgcatgaggacacatagcagtacacacacattgaatgaattgttagtcatgcaaaaaaagaaaaggaatgaaccaagatgattgcaagttaatctcatttaagccctctaaaaaggcatgctttgctagatttagatctgttttccttacactcacttatcttgatgttcacatggttaataattccttaaaatagtgcctgaagaataatatttcatattcttgacccccaaataacagtttacttaattttataataagatttttcccaatgagacttattttcaggaatccttctcttaataacttttacatattgatataatgtaccaaaacacaattgcctagagatgctttagctaatttttattaataaagaggacaatatttttgtcttcatggaacttatttttaacaggaatcaaggaagaaaatattcatgcagagctatgacttagaaagttataggggctgccactatacagcacttctaaagtaaaacatcttctatctccaactgggctgtcaacatagtggactttcatgttctatggatatgaattctttaaggatrtagcccttaattaagctgtaaaaacaatgcatctctcaaccttgacatttaggatctctcctgtctgccccctctacgccccactccaattaactcatcctacatctctcagatgtaagttggataagagtgggtttgaagtttggtaatacaagtggcagttttaaaacaccaaattctttagatcagctgaaaagaagagtgagaattgaaaattcctccactagtaattgttagccaatagaatagcctcccagagcagtccccacagcacttggttgccatgggtttctctyctctcactgcctgccccagtgccatgatgtctggggcttgtctcttctatggcatcccctgattgacttttgtatagcaacctctgtgtcaagtcagtaatatgatgccattgtaataggaggccttcctaaagaagtaactgcaacttttaaaacgtgatgattattggtttttataatacacaaagcattaattttttcttatcttattttctctttattatttctttccaacttttgtttggagacatttatgttagaagaaaaactataaagttttatcattgtagagaacagagagatcaaagacagctggactgtacctgtttgtgtaattatttctgatatttttaggaaaagaagtttaacagagtaactcasactgagactgttaaactctgttcatgataaactccatattacataatataggtgaacagattaattccctccatgtaactaagatactctatttacattatttatatactctcttagttttttatgcacttccaagttttagttggaaaaatgaaaaccaagctactacttaaaagttattaaaaacttcacataaaatatttcattttagctacaagttattcattgcataggattttataaatagtctgggtatttcataggaactgcatttcaaaagtgaattaaccaaacctaaaaaaagggttacttttaaaatgcattaaaataaagaagtttcatattcagttgataaggccattaaggtaggataatgcagttacatatacaaactaaaaaaggaaaaagaatatattttgtggtccttaatgtttgattgcactattgtttcccacagcttagccrtatctatttctgtataccaagtattaagctgatatgtagctaaatatttcttacagttctggtaactggtaactagtgctgtgaaaggttttggtattgtaacattcccagttttgtgagttatatattgtatattgaagatgactagtaaattcaagtaatatatttatctacagctgggaaaatataattattttcaaatcttcaagtaagttgtatcgaatgtttttcttcctcttaagtgagataaatctcacttttatgttaaaatgtctatttatacaacaggtttctccttttgctgttattttcatattaaaatttttcttatctttttatatcaaaataattatgctggctattcaaactgccaagatgtattttagtttgcaggatttttggcagacaaaatatttaataacaaatataaaagctttgtatattttgtggcattaggggcaagaattttacctttggatttctctatgtgaggcagtgctggtgtcagcaaagtcagtaacagacagtattacttgtaatcatcaaaagaaggtttccacaagttgtataaatcagtgcatttatttattatgttgtgaaacttaagctttatatgaaatacatattctagctcttttcctttttactgctgttgtttagagtgtgtagttctgttgatgatttacttatgtacttgaagtactcatttctgtcaaacagatgcccaactattttccttttaaaaaactgtattctttactgcaatagatagcggaatagtaatagacactttgttaaaaaaataagtttcatgtttaaaataaatatttttttaaaatataaagccaaaatgaattcaccaatattaaggatttaatgtagccaagggattcagtgtgttatattttgccaatatgtattttatcttcatgtcacaacttattttctgtagccaattctcagttttagttgaagagagatctcagtgattgtactgccaatatgacattcaaatgaacattaggaatcttgaaccatggctgagcgctgttgctcaggcctgtaatcccagcactttggaaagccgagggaggtagatcacctgaggtcaggagtttgagaccagcctggccaacwtaatacaaaaattagccaggtgtggtggtgggtgcctgtaatcccagctactcaggaggctgaggcaggagaattgcttgaacccaggaggtggaggttgcagtgagccaagatctcgccactgcactccagcctgggcgacagagcgagactctgtctcagggggaaaaaaaagaattttgaaccccccaaaatatcacatatctagcagttctaggttccagggtggatatttttaacatatgtttgcatttggttctgggatagtaaccgttatggataattgtttgtttctgtcaagtcggtgagattttaattgtttgaattatttctatttaaaattactctcaatttaactgtttaaaaaactaaaaatttaaaacataatggcacaacatacgacacagaataaaacacatgttttcaaggaagaagaaaaaactgttttgacttaatgtgaagcaggggtttaccaaagaaaattgctttaataagccctaactttaactgttttcttctatgttacagtgttagcggttgatgtattgtgtactgtttaagaactcataggagactaataattaatttactataattttaaaggcaaagagttttatattaattttactgttgcacaagcagttattggaagtgggggaaaaaagaaaactggtgagagaaattacatggaaattataggaaaaaggaacttgaattggtaatttggcaaagatttgggaacaaatagtttgaacatagatttctttcaccttatatgatagaaacacaaggcacacgtgagctgtatagtgtgctgagcacacccccagaaaacaaaaaatatcacattgatgaagtccgagactgtatctagatcttagcataactagtgaattcagggagcacatcctgctgctgaaattgagaagtcagtaagaaggtagttcagatgacctaatcattcaagacatttgatggagtccacacaagggtttatgatgtggggcaaatatctgtgctttctcatctcagtgattgatgtctggagaactagtcagacacacttagctggttcctatagaaaaacaccagtaaatgtggatcagaccataccctgcagaccaaggagattttcttaaacttgctaagcctttcttaaacttgccaagtattagcaatgataattgctaaatggattttttcctttcactgaaacaacaaaacaattattgaaattcacaatacctagagatgggaacatggtttaggtttatccagttctgtaactgactttggcattggctcattgtgtcctttctacaagttatgttttggtgacttggtgtccccagttagaaatggcacacaatattatcagttgttagtacttggtaacgtttcttttactaaaggaattatataagtatgaatcatacctaattttacaatttctttcccacggtcattttggatataaagatagacttcccagacagtgaggttagaaattagaagttcaaattgatatccctgatgtttaatttaaaaatgaaagtaaagttaaaattagtagcatttgtaccagagtagattatgggtattttcatctgttatattacatgttcatattattcattttaggataggccaaaactcacttctaaaatcttcaaaaattttgaatagtttcattttttcaatacttaagccaaaygacaattttatagatgtgaatatatgttttttaaagttaagtccttcatatcttttcttagtttaactccccaaagaggaaaatgtctctttaaaccagtagttaaaaagatggagtatgtgatgttcctttctctgtactgagttctgaatgtttaatccagagcatggatcactgactgcgttctctgactgtggaatggtattctttcatgcaaagtactttcaaaacttcccataaagaaactaaactagagattgtctttattaattaatggaactctgggtatgattaagggaattaaattagaaagtagaataacctagttaaaatcattatattagttatacatgagagtcagtgaacgatgacttgatttttacatgacatttgaattctgtcactatctgattcttgacctaaaggtttctttgctaaatctgatatttattatagtataatatgataatttggagctcctgttgcatctcactgccccaaaaatgttggaatgccatatgatacagggaaaagattggagttcatcaccgtggaattttgatctgtcttaatgacacaacttaattttcatgatgatagatctctgaatgattaatccagaatgatttggtacagtgactggaagaaattgtttttctgggaatttgcttcccataatgacctgatatacaggtgaccttagtataattgaaattaattataattttaattagaacatgctctgtttacagattataattgcgcagcattttaaaaaaatatacataattatgaggatgagagaattgcaaacttgaacagttcttttgttttctctccttttacttgaaaagctttcagaaagcttttgaaagatgacacagttttcatagcaacagtatgcaaattaggtttttytgccaagaaactcataaactaaagtatggaataacacaaatgcttaatyttaatyttggctttggattttgtaagcaaaagcattttytgcatcaatttttttcagtatgcagttgcatatttcattttttgattatgtcaaaagttgaattctcattttatgctgtgtttctcattagttgcagtaaagtgttgatttcattgctgcctttcaggccttcatcatacaaaccctcaccatttttcactcctgtgcttttgccataggtttttttttgtttttggtttttttccagcaactagtttttctactttcactctttcccaccagagtggtctctctaaaacaaatttgctaaagttcttaagtaggctcttttttctctaaattacagaatagcaaactaactcctaagcaagatgagtcagtgtctatgaccttgcctctttcttcctttttagtatcctcaccaaccttccctctgttgacttttgtaatccaggaatttggaactacttatgacttagtgccttggcataatcacatgccatagatgaacatgttcaagactcagttcaaatttaactttctgtgaagccctacctgacttccctaggcaggtattttctccatgcctatagtatattgaaactttttctgttaaaataacataacatttcaattacacacacacaacctgtctcttccactgaacttctctctccccctttgtattctcagtgtctagctacacataataggactttgataaatatttttgaatgaaggtaatagaaaacccgaacttctctatatttgtgtactttcacaaacaaaggcttagaattccacatgaaagtccacatgaggtaagtgtgcattcatgagcatgtgtgcactctgggcaaaccaacagaagataaacagcaaggaagagcagttgttttgtgaaaaataatcatctgttagctgtaaatcagaaatattggccaaatcagaattcttgtttctaaaatgaggcttctaaaattttcacataactgccaaactcttatttgtaattcttaaatatgccctaaagatcatctttctcttttatagacatttagtgtatacagtccacataaatacatatactgattacctacagacaataatgagacttcagaaagaatcaaaagcaatagtgatggtggaatttttaaataatattcagctggggggaaatagactgagtttgtgtgatttcaggttatttagagttattaatgtaaacataagaaggcttgtgactcttatcaccctctatagaatataaagactaaaaataaaaactattacctctgggcctgtttttctttgggattagataaagcctttctaccatatcaccaaatactcataaaggctaacacagaaagcttttccaagttaataatttctaaaattaaatatcagggccaggtgtggtggctgacacctgtaatcccagcactttgggaggccgaagtgggtggattacctgaggtcaggagctcgagacaagtcaacatggtgaaacctcatctctgctaaaaatacaaaaactagccaggcatggtgatgcacacctgtaatcccagctactcgggaggctgaggcaggagaattgcttgaacccaggaggcggaggttgcagtgagctgagattgcaccactgcactccagcctgggcgacagagtgagactctgtctcaaaaaaaagaaaaaaaatcaaaataattgtaattaactgaaatgccctgttccttcattcacttgatagacttttctacctgctctatacttggcactcaattagattctggggatacagataaaataagacaaagctcccatctggtagagtccaagtttgttttcacagttatttttccacagtctgtttaaggtattaggaggacttttataaaccgagtgtttttcaggttacttcagagaggagtctccttccacccaaaaaaactaaccaaattattttatcataaagaggtaatcccatttttatgtccacaatttttacatttttgtatcagccaccaataattttgactgttttgtcaagtacatatttcatcaatcctatttccacagccgtacatgtgatcccagtgactgatagatctgtagaatgtgaactcacatttaaagtttattttgggaaggcatatatgccttttgatgacacacacaccaaaatatataagagctgtgcatggtaaacccacagtagaagggaaaaagtaatgctttctggtatacttcagaggctccatttgaagatgtgcgttgatgtttccttgattattttgaatgaggagtaggcggtaatatttaacaggtagcatacgtatctaagcatatagtaaatattactagtacttgtgtgccatgaggcactaatacataggtgaaacaaaaatatttttagttctaaaaaattctctagatatttatggatggttaggcaatagggttccttcatgagaaggaaaaaactgtatctttattgtcagtaagtgtggaaaaaaacccgacttgtatgtgtattcacagtttgataggcatattttgaagtcattgttttccatcartattaagtatcatccatttctatgttctctagcaaaagaaaattcttagtgtgatacagctttactctttgtttgactttgtacaaggtccacaaaaggaggaggctcaaaagattggacactttaccctgacattcagcacattcattttatctttcgataaagataaccagaaatcatttgcctcttgtttattatcatgttgaaaacacaacagtatagttccttttgtcccttacattggaaaaggtattttaaatttagccttgccgtattatttatagttaggaatttactacattttggtagtctgttttgaaactaagcacttgtgtctgaaagatgcagataatatctatctatttattacacagtgggctctgtttgctgcagaaaagagtgaaacttttaactgcttagcacacttgccagtgaaatatacctgacagagcagaggttataactttggctctaattacttttagtaatggtaagacaacgtgagttttgtttgtttacatgctgtttacaatggcataatttwaaaaatatatacaattgagatatttattgcctactattttaaagatgttttatgtgttttcacctttggaatatattgttacatttccttgtacagataattttggtggctttgttaatgtagctagtaatttttatgactactaagtgaccagttttcggtgccttttattgtgggatgcatgattatgtatttattgtacggaagtcactgacgtgtgtatttttgtactttgctgaaagtaatggttgatcctgatgtacatgatgatgaaagacatctttcccaaagggcactgccttgagatcatccttctcaaataaaaagaatgcatttgaagaaagtgtgaagtctacgttgtttctggtgggaaatcttttttaaaattaaacttttaattttgagacaattgtagattcacatgcagttgtaaaaaataatgcagagagagctcgtgtaccctttacccatttccccyccaaaggtaacatcttgcaaagctgtagtacagtatcacaaccaggacattgagatgcataaggtcacaatgctgaacagttctatcaccacaaggacccgtaatacaratccctcatgtttcccttttataggcayacctacttccctcttgccctcacacacttcttaaccccgggcaaccacttctatacttttatcatttcaagaatattacataaatggaatcatacagtatgcgattttttttcactttagaataattccctggagattcatctaaattgtgtgtattgatagttcatttcttcttattgctgagtagtctcgcatctggtgaargaattcttgattgtaagaacataatttggtttgcatttatagtaatgattccttaaagttcacctcccccaaaaaaccactcgttaaaagtccagtgcatgacaagtgttgtctctagtggtaatgatctgtgaatagccctttaaaatcactgtctggtgaggaagaaagagtgttgtaacacagagtgttatgtgcagtgataaaaaatatgccaccaagtttaggggaggacaaaggaagggcagagatagagaaagttcaggggcaccttcctggataggggacattaagtcgaatcttacatcagttagccaggtgaagtatgtgtgtgagaaaggcagagaggacagtgcaagcaaagataggcaagcagcatggagggtaaaacatgctgttgctgaaacataagggagagatagaaggtggaactggagtaggcaaggtcagaactaagcaatccggtttgagccctggccaaatccgtgacttctgttggtgggattgacgtgaagagagcagaggacaaggagatcggttagaggttatgaaagaagtttgagtgagaaatagcaagggacttccttagtgcagttttagtggaaatggaaaggagggaacagatctcagaaatactcaggtgtaaatggactgtacttgagattggctgtggatggatgaggggagagaagaaacataacaaatcccaggtttctgataactgaagagggaagcatgaaattcaagttcagactcagccatcatggtttcaaggtgactgtctatgggatacatcatgttggagagaggtacgggagggaaatacagatctgagagtcattgccatatgggctgaaacctttggagaagatgaagttatccagaaagatccttaggaacttagaaaaggagccccacagaactgggattcagacctctgagaagggggcgctctccygatggtggttctaggaatgccagaggaagaagccggagaatgaatgaagccacctgcctctgccagggtgagaaccagtgcccctgagacactggcagcaacagtgagcaaaacagaaagggcaagtcctcttttcttctgcaggaaagcagctggcaaagcagcagtgctgatcgcagagcccaatgccagcatcactgagcagagtgtcaggagtgtatctagcactgagtaacaataatccagtagtttgccactaagtctaacaaggcgctcttaagaacaacatactggccgggcgcggtggctcacgcctgtaatsccagcactttgggaggccgaggcgggcggatcacgaggtcaggagatcgagaccatcctggctaaaacggggaaaccccgtctctactaaaaatacaaaaaattagccgggcgtagtggcgggcgcctgtagtcccagctacttgggaggctgaggcaggagaatggcgtgaacccgggaggcggagcttgcagtgagccgagatcccgcccctgcactccagcctgggggacagagcgagactccgtctcaaaaaaaaaaaaaaaaaaaaaaaaaaaaagaacaacatacacaatcttatcaccttcaggggaaagtggggcaagaagctgacccagaaggaatgcttgagggactggaggattcttagcttggaaaagagaacatccaggggcagggattgggggtagaggtgggaaatgaagttggacttaagaactgccttcagatatctgagggactgtgatggagaagtgggcttgcattagttctaaatgagacaagcaagtgaaattgacagcaaaaactgattatctaaagatgcactggagtatctcataaaatgagatctcctttgatagagagattcaaacagaggctaccaacacttgacggttgttgacccttgagaatgtgaactccatgagggaaaggatttttttcatgacgctatcccaatgcacggaatagtggttagcatgtggtatgtgcacattatctatttgttgaataaatcagaagtaatttaagcatcagatcagaggaccagatcatcttgaggtctctttcacctatagattgaatgcaattgatcatatgtaaaggcaaaatatgcagagtcctcactgaattaggaaataaatgaaccagaatttaaactccaaataagttggttatccacaccctttaaaagcaggtcactactaaccaatacttttgttttttttttgaaatggagtctcactctgtttcccaggctggagtgcagtggtgtgatcttggctcactgcaaccaccgcctcccaggttcaagggattctcctgcctcagcctcccaagtagctaggactacaggcacgcgccaacacacctggctaattttttaattttagtagagacaagttttcaccatattggccaggctggtctcgaacccctgacctcatgatccgcctgcctcagcctcccaaagtgctgggattacaggtgtgagccatctacatcatgaccctgaggcaccgcctgattctgaagggctagctgaatcatcatattaaactacttttattttaaaatgctaattgtattatatatcctaattctttaaaaagtakcagtgtgtttacatagccataactcttggcagctaatgggttatagtactagcaagttagaattttcaccaggaaatctaaatacaatagatttttctgatgtggaaatcaagaatcatccaagcaatccaaggatctgaaccccatctttcctgtcctactgtggccttggtgtttgtctccataagttcttgtgccaccaccagtacgttcacaaaatgtaacaattggtggtatggttggcaacataatggagcttgtcccaaagcaagcctgggatggtgataccagccgcaagaatgagagactacaaggctgggcgtggtggctcgcacctgtaatccctgcagtttgggaggccaagggaggaggatcgcttgagcccaggagtagtttgagaccagcccaggcaacatagtgaggcctcatctctattaaaaaaaagagagagagaatacaggcaaatatatagtgtcatagcagtgtataacacttcttagtttgaggtactatatctacatttaatcctcataccaaccccgtgagtttattattagccccatttgaaacaccctcacacccttggagttgggtctacttctggcaacgacattttggatgaatgtgggcattggagcactaccctttcttagaggagcgatactgacttatcgaataaaaggcagcacaagaatacagtgagtcaggtaaagtatgctctccacatagcttctctcccacgsaggcctcccgcgcaccctaatccatgctgctgtatcaccccccgcaactgagaggaaggccacaaatgaaagtgatctgagatctcgtttaatttgtttcaagctttttttgactgctccccatggtgagaaatacattttccccaatatacataaatatatatgaatgtgtgtgtgtatatacacacacatgcagtcatgtgctttataactgtttcagataacagtggaccacatatatgaccacacagatatccgtggtcccacaagattataatgaagctgaaaacttcctgtcgcccagttacctcatagccatcacaacattgtagtacaacacattactctcatgtttgtggtgtaaacaaacctactctgctgccagtcatattaaagtaccatmtaacacacacaattacatacaatacataatacttaatgatgacagtcaatgaatatgttactgattggtttatacatttcctacactatgtatactttttttttttttttttttgagacagtcttgctctgttggtccaggctggaatacaatggcatgatctcgactcacggcaacctgtgcctcctgggttcaagcaatcctcctgcctctgcctcccaagtagctgggactacmagtgtgcgccaccatgccctgctaatttttgtatttttagtagagacggggtttcaccatgtttgccaggctggtctcgaactcctgatctcaagcaatccgcctgccttggcctcccaaagtgctgggattacaggcgtgagccactgtgcccagatctacactttttatcattatattagagggtactcctacttattgaaagaaaaaaaagttaactatgaaacagcctcaggcagttccttcaggaggcattgttatcataggagatgacagcttcatgcatgtttttgttctgaagaccttccagtgggacaaaatgtgtaggtggaagacagtgatactgatgatcctgaaactgtgtaggcctaggttaatgtgttttgtggtttaggttttttttwaaaaagtttaaaaagtaaaaaagttaaaaacaaaaacaattttaatagaaaaatgcttatggattaaggatataaagaaagaaaaagcttttgtataactatatgtttgtgttttaatctaagtgttagtacaaaagagtcaaraagttaaaagaagtttacaaagtaaaaatgtttcagtaagctaatatttattattgaagaaagaaaaatattttaataaattcagtttagcctgtgtacagtgtttgtaaagtctacagtagtgcaaagtaatgccccaggccttcacattcactygccattcactcactgactcacccaaggcaacttccagtcctataagctccattcatgaattaagtgtcctatacagatgtacctttagcctgtaatcccagcactttgggaggcccaggcaggcctatcatttgaggccaggagttcgagaccagcatggccaacatagtgaaaccctgtgtctaccaaaaacataaaaattagctggacatggtggcacatgcctgtaatcccagctactcgggaggctgaggcaggagaatcgtctgaacccgggaggcagaggttgcttgcagtgacctgagacggggccactgcactccagcctgggtaacagagcragacaccgtctcaaaaaaawawatatataatatagatatacataagtataatatataatttatatataatattatatatataatttataattaaataatatatatttatgcaattatttaataattatttaaattatattgtttaatatttaatataaatataaaataatttataatttcaatgtaataatttatataatacataatatatattatttgtaatatataattatgatatatatttatattatattttatatttttactgtagatatcttttatatctttaccgtaccttttctctgtttagatatgtttagatacacaaataccattttattacaattgcctgcagcattcagtacactaacatgctatacaggtttgtagcctagaagcaacaggctatatcatatagcttaggtgtgtagtaggctatcccatctaggtttgtgtcagtacaatgtgatgttcacacaatgaaaaaaatcacctagcaatgcatatctgagaatgtgtccccgttaggtgatgcgtgactgtgcatacacacacatatatacatgatatataagcagatatgtttatatatcacaagtttaacaaaatagcacttatgtacatgcaatatagcttaatattttctattctattttgttttaaaaaaattactgattgtggcgggcacagtggctcatgcctgtaatcccagcatgttgagaggccaaggtaggtggatggcttgagcccaggagttccagaccagcctgggcaacttgcagaaactcagcctctacaaaaaatacaaagattagctctgcttggtggcgcatgcctgtagtcccagctactagagaggctaaggtgggaggaccgattgagcccgggaggaccaattgagcctgggaggatggagtgagcccggccctcttggttgcagtgagccaagatcatgccactgcactcctgcctgggcaccagagcgagactctgtctccaaacaaacaaacaaacaaacaaaaatactgattgtaaacaaaaatactgattgcaacctattaaactgattttgtaacccactaatgagaaggtcagcaaactttttacgtaaagggccagatagtaatattttcagctttgcaggacacgtggtctctgtcaggactattctactctgccaatgtggcaggaaagcagccacaaacgatatgtaaatgaatgggcatggttgggtcccaataaaacattatttacaaaaacagatgttggcacatccctacactaataggtcatagcccacagtattaatttttaaaaccacagagctagttcaacagtttccaatgattagctgaatgtctaagaatcatttgcagattatgtttwaaaaaagttttcaggaaccaccctggacctacacaactagaatctcttgggaaggggtttgggacaccaacatttgaatcactctccttcattgattcttacctgtggccaggattagggatcactgatttgatccagcctcctcattcactccagctccagtttttttgtttttttgttttttttttttagatggagtcttgctctgttgcccaggctggagtgcagtggcgcgatctgggctcactgcaacctccgcctctcgggttcaagcgattctcctgcctcagcctcccgagtagctgggactacaggcacatgccaccacacctagctaatttttgtgtttttagtagagatggggcttcaccatgttagccaggatggtctcgatctcctgacctcctgatccacccgcctcggcctcccaaagtgctgggattataggcatgagcccccacgaccggccactccagctcctatttaaaaaaaaaaaagtttataattaacacgtaattgtacatttatagggtacaatgtgatacttcaatacctgtatacattgtataatgatcaaatcaggatagttaacatgtccatcacctcgaacctttatcatttcttgatggtaataactttcaagataactagaaaagaggatcttgaatgctatcaccagcccctattttacaaataataaactgaagccttgaaaagctatgttctgggctacaaacaattgtcaataatgttgaagaacctgggtcatacaaactggggactcttactacagtgcagtcacattataaattaataacaaaaaatctgaaacagaacataatactcactcttacaatttgttcaatacatatccctgcggcacttcagcagaaagtgacaaccaattaaaggacagaagccagtgcccattaaagtgataataagaatattaagcatctcatggctactataaaaggttgttcagcctaaaggcataaatgtctagaagctcattactgcatgataacaaattttcaaccaacaaaaaacactaatatgtagcactctaattagcttaattatgatttcatgagctatgcaatttcaatgggaaatgatattattaaagcatatcggctgatttgaaagtgattacagcatgctggcaatatgtttaatgttgttttggcctgcagtaatcttaattttaaaagtaaaatttggtctctattttcatcaagatagaaattatcttgatacagactttatatatgaactttaatatattgaaagaataaaatgggtaaaaataggcacaaataaaaattaaaagttaaaaaccgagattagtgaaaaatttattgyaaagctctgtgaatttaaatatttgtattggccgggcacagtggctcacacctgtaatctcaacacttcrtgaggctgtggtgggcatatcgcttgagcccaggagttcaagaccagcgtgggcaacatggcaaaacaccgtctgtactgaaaatacaaaaattacctgggcatggtgacatgtgcctgtagtcccagctacttgggagtctgaggtgggaggatcaattgagtccctgtctgaaaaaatacatatatttatttatttattttatatctatattccttttatacccactcatgtctgttctgcagtctctgataacttcatcccttysgtattaactgaaatcacttcttccctctgtgtattgagtcaaaatgaaaggaacgcttccaagctctcctctgatttctcatccttgtccatttttcatcctccacacactacatacagatatgcacacctgtgaacacatgcatcaccctgcattatatccctcccatcctctccacctccactaccacctcgtattcacctgtgaaccttctactcatccataaagtctcacggggaccctcaacagaatctttcaaaactcaccaagagtgtataatrcttagatattttcatctctattcccattacagcgtgttcccattacataccccccactaaagcaattatattgcatcataattattaacacagttatctttccacttaattagcttttgcttgagaacagagagcatgtattattcatcctgtcctcatcacgctgcacaaagtttggttcctagctggtcttcaaaaaatgtcctttgaatgggtgaggagagtatttcacttggaatattgtttaaaactcttaacctctgtggtcacaagtgatattacactgcctttgtctagtttgggagccaaggttacagtaggtcataaaatgaaagagcttttccttttttttttttccccaatctgtgatgaatttgtgtaagaacagaattacctgttctttgaatgtatggtagaattatctgtaaaactgtccagtaatagtggcaatcttttctttgggtatgttttatttttctgacttcttgggttggatgtttaatacagtgtctttactaataaaagcatgtagaattgtctatttttctgtaagtactactttagctgcatcccgtaagttttctttaaacatttttcaaaatagaattttattctatttttttagaggatatatatgagttcaagatggtcacctgcttctctaggaatccaagggacaacttcaattcctttaggaggtaagtggcctgagactccacackgcctatatcccaagcgaatgaattggtacttaggaagtccaggcagaatctcagtgagatatcctagaccagcatggtggaagcaggaaagagccacagaatagggatcccatggatgctcaggcttgaaggtaagctccccagacactaaacctgcaattgcacgctaattctatatgctaaattccactgcgcagagacctatggcaactgagtcggttggggaaggtctcatgcatcctacaactttttttttttttgagacagagtcttgatctgtcacccaggctagagtgcagtagtgcgatctcagctcactacaacttccacctcccaggttcaagcgattcttctgcctcagcctcccaaggagctaggattacaggtgcccaccaccatgcctggctaatttttgtatttttagtagagacagggtatcactatgttggccaggttggtcttgaccggcctcctacaacttttaataggtagtctcattattatccaatttcaagcattttataattgactttataatttctttgattcacaagattttagtaaatgtgttaaaggcagctttctaccctaaagttgaaggtgtggcatgggttaatttctggttcacctttatgctgagtgctatagtctagtttgtgtccccctaaaattcacatgttgaaacctaatccccaaggtaatggtattggcagggggatctttgggaagtgattaggtcatgagaatggagtcctcgaatgggattaatgcccttataatagaggattcagagagctcccttaacccttccaccatgtgmggacacagcaagcagaggccatccaggaaccaggaagcaaaacctcatcagacactgaatcagccattgccttgatcttggacttctcagcttccagagctgaaagtgaaatgaatgtttcttatttatgaaagaaatgtttatttattttataaaagaaatatttcttacgtataaactagctagtctatggtattttgctatagcagcctaaatgaactaagacacttcaggtgctgccctttggtgttttagcttagcggggagatttcctgtgaaagtccccacttagagttggtactagcttgactatctttctcctaagctcctgggaataataaaaataacgcttgaatttagccattgtggtaaatgccttcagataaaatctgattctgtgataagcttaactttctaggttcttgccttcattttgttttatcctgcatttgcagttatttacaaaggaaaggtggtacaaatctgcaccgttcaatatggtagccactggctacatgtgtctattgaacatatgaaatgtagctcctctgaattttctaaatacccattggattttgcaacttagtatgaaaaaaagaatgtaaaatgcccccataataatgttatattgttcacataggcagcctcaaaattgggagtgggttaccaaaaaaaaaaaaaaaagtatattaattgcttaaagcccagaatttattacctcttaagatgtttctggtgggagagtatattggtgtagcattttggggaaagaaattggcaacataaattaaaattatctttctaccctaataagattcagtaattccactcttagaatctatcccttgaaaataaatagaggaatgttcaaaatgtatgcataagtatgttaatcacagtgtggcatgagatagtgaaatactgagaacaatctaaatgccagatgatagggacatgttcatacaaatcatgatgcatttattttgtgggatacaaagcagcttaaaacaatggatatatggccaggtgtggtggctcatgcctgtaatcccagcactttgggaggctgaggcagatcacctgatcacctgaggtcaggagttcaagaccagcctggccaacatggtgataccctgtccctactgaaaatacaaaaaattagccaggcatggtggcgggtgcctataatcccagctacgtgggaggctgaggcaggagaatcacttgaacctgggaggyggaggttacagtgagccaagatcatgccattgcactccactaggcaacaaaagcaaagctccgtcagaaaaaaaaaaaaaaagaatgttatatagttataccttccttgtgtttggcatggaaacaatataacgtattaagtaataaactaaattgaaggcagtatatatgctttataatcctattttgaattatacatatgtgtacgtatgtgtgtatatactaatataaattctggatgaatgttcaatgaaatgtttcgtgatgatttctacatagaattagagatcattttcaaatgattttgccatctttatgcatttctttttttaaaataatgaatgtgatgctttcatagaaaaagcaatgatgttatttttggcatttttattaataaaagattcttacattgctagacaaaaatttttatattgactaattgttgaaaatatcttgtatatattggggtaaataaaatctattatttttgcgtgtttcttttagyttttttactgagagtactagaaaatttaatattatataatggcatacattatatttctattagactgtggtagtctcaataatctagtgtgcagtattktttagggaacatatcttttaaccatgctattaatcttttgtacattatgaatgctcaatatatgttgcagaatacttgatagattgcttatattttatgagaatgaatggagattttttttaattgaataagaatttttttaaaaaaccaacttaaatggggagactttcagttctagttatttcctagaatttttactttaaaagagaacatataataaacatttgatttgctgtcagtgctatctctgagaaggcaaatgaaacaatgaattccaacacagcccctaatctgtttgagtgttctgagatacagaaataacaaggtttttggcttgtaaaatgtcattacattattgtagaggacaaaatgtgaaggcagaaaaatttgggcaatgtcagccatgttccttagactttaagaaagttggtggttaaaaattaagagaagaaaaacgttattcagcaaatgatgttggaataattagatgctcatatgaaaaaagaaaaaatattaagtcccttcttcataccatattctaaatgagttcctaataaataaatgacatgtgggaagcaaaactgcgaacttctcagaagaaaatataagggaatattttctctgtcattgggttagggaaagattattttaagtaatatataaaaagggcagcccatttttatcttcaaaaaagagactgatagagaaggttgctgcaaaattggctgcacgtacaggcttgccttttgtcactrctccaaataaatktgaagctctggctgctcatgacgctctggttgagctcagtggagccatgaacactactgcctgtagtctgatgacgatagcaaataatattcgttttctgggttctggcccttggtcaggtctgggagaactgatcttgcctgaaaatsaaccaggaagtagtatcatgccaggcaaggtgaaccctactcagtgtgaagcaatgaccatggttgtagcccaagtcatggggaatcatgttgctgtaacagttggaggcagcagtggacattttgagttgaatgttttcaagccaatgatgattaaaaatgtgttacactcagccaggctgctggcggwtgcttcagtttcctttacagaaaactgygtggtgggaatccaggccaatacagaaaggatcaacaagctgatgaatgagtctcaaatgttggtgacagctctcaatcctcgtatagcgtatgacaaggcagcaaagattgctaagacagcacacaaaaatggatcaaccttaaaggaaactgttattgaacttggctatctcacaccagaacagtttgatgaacaggtaaaaactaaggacatgctgagtccaaagtgatttaagtaaatttataatgaaaataaacgtgtatataattttttaaaaaactgataaatctgactaataaaaatgcaaaagctttattcaataataaacaacacataaaagttgaaaagacaggctgtggactgtaaaaatatttttaaacatacaagtgatcaaggattagcatccaacatgcatacatagctcctaaagtcacttacttatgttttaagtcaagcttattgaggtgtaatttacaagcaagaaaactcatcctttttacaacagctgtatgaattttaatacatgcattcaattttgcaaccatcactataattaatgcatataacatttgttttatcttacagaaaggtctgtagggcctctaggtaatcaatccctctcacacctgagccgttggcaatcacagatctgttttctattcctgtatttttgccttttcaaaatgccatttaaatggaatcacatataatgtagcttttatagtctggcttctttaacttaacatacaaatattgattatatctatagattttcctctttgttgctaagttgcattccattatatggatagaccagtttgtttatccattcaccaagtgaaagacactggaatgttcccagtttggggtgattacaaatgaaaccacaataaaaatttgtatacatttttgtwtgaacatgtattttcctttcaggaaagcaccacaggactgctgggtcatatggtaggtagaaactgccaaactattttccaaagtgactgtgccattttcattaccaccatcgatgtatgagtatttgttttcattgcttccattctagccaatacttggtattgtcatttttatgacagttctaataggagagtggtggtatctcacatggttttattttgcatttccttaatgactaatgatattgagcatcttttttgtgtgccactttgctatctgtatatattcatacaagtaaatttttagaaaaccaaacaacccatttgaaaaatggacaattgtatgaacagggaattcccagaaaagaaatttaggaatcagtaaacatcgaacaatatgttcagtagtactagcagtcagagaactgcagggaaatgagatatcattttgggtcccttggactggccaaactgtgtaattttggcaggggtgagtagaaatgggaatttgtacacactgtagataggagtttaaatcagtacaactacctggagacctattttgtaatacctagtaagttgaagatgcgtctagtttgtgacccaacagtcctgctactagtatatatatatgggcacaaaggtacttgaaacaatgcttattgtaagattgtgttaatgaatatgagaggcactgaataataggagaatgaataaagtcatttattaattcaactgagtgaatgaaatcaatatgaccaatcagtatgaataaattccaagaacaatgttgagtgaaaaaataagcaggctgcaaaactatatactacattataccgtttttgtaaaaattgtaaacattcaaacaatgtatgtcttgtttatggattcatatatgtgtagtaaaagtataaaaacattcgtggtaatgatatgcatcaatttcaggatggtgggttcctatgaagagaaaggaagagaaaagggactctgagaaaggggctttagctctccctggaacgttttacttcttaaaataaaacacctgtatttatttatttatttatttatttatttatttatttatttatttatttatttatttgagatggagtctctgcgacccaggctggagtgcagtggcatgatcttggctcactgcagcctctgcttcccgggttcaagcaattctcctgcctcagtctcccaggtagctgggattacaggcacacgccaacaagcctggctaatttttgtatttttagtagagacggggtttcaccatgttggccaggctggtctcaaactcctgacctcaggtgatccacctgccttggcctcccgaagtgttgggattacaagcatgagccaccacgtctggcctattttggatttattttaaatattttataatttaaaacaatatcctaactagttccaacctctgccttcattttctccctgcagaacaacctgagcaaggctctaggctcaaaacctctttagaatacacaaaatatcctactgttgcctctagcgttaatcttatgcccccgttctgaaaacatggtttcctaatttattagacttcagttctctcttttcattgaacttgaggtccctggtaactaaggagttgactgagtactgctcactggtactgacagatgcaggaagcatgtaagagggagaatccctggagaatctccagcccacctgccactgggagaatggggtggagccaccgagaagtttctgccttgtgcacgggggaggagcctgggctcttgagctcctgtgtggtggcctggtattcaatctgtgagatgggagccgttggcaggaacccctctcactttgctgagagttttttcttttttccttttcgcccaataaattccattccccacccttcaatgtgtctgcatgtctaagttttcctggttgtgagataaacccgaatttagctgaactaaggggcaaaaattctgcaacagtaatatatataccgagtacttgtcctggccatccctgtcccctgtggtgtcctgcttccacacccacagggatagaggccattttatttgttgatatactttctcagtgcctgcccattgtcaggctgggtttctgagtatctcctgattctctaatgctatattttgttagctttttggatcatctcttatacttggtgttggatcctttgacacctggtgcattcatgaactgtctctggaacatggaactctgagctccagactgaatttccacctagctctcttgcctaaaacctgttccaatctagtagatgaatgtaatagagggcctaagccaagatgaaaatttacagttttcagcacttgctaagcttccttatttccttcctaacctgtgtcagactgatcaaattaagcactggagatgcaggctcttgaaatagaaaatgtgttgggacacagctgtctttcattacctttccttactcagacctagagataaagtatttcttggaactataaccctctgttttggagatgatagtggcctccggagtcttttaagtgagtacacaggaagtcacgtccccaagctacttgccttataaaatgcaacacctcttagcaatccttttgtcttaggttacctgaatagttctgcttcgaacagcttggccctcctgctaattttcctccggttctatgctaggttggcttcttgcttgtttctgggacccctctatttatttccctattagagaccacagcttatgcttgacttagactctttagtaactgcatcgtacccaacctaagcaccccactgtcttcaaggctactgactccaagccagaccttcactgctattttgtccccattcctcaggtcaagcctcaagaaaccatatgaaaagaaagaatgaaaaggtattgtggaacagcagaaatgtgcctgttgataacaattgatgacaattatttgattttgtgacagacccttgggagtcaataaggcacagtcgctacctgccttcaagtggcacattggtcaagttggttatgaagaaccaaagataatgtgtaaaacaggagtaatgtgtatggccagagtcacagactagggaaatgtatcccatgtaggcttcctgacaaatgtcttttcaagaattctcaaggagagtcagatccttgggacaggaggtgatgctacccccttcaactggactaatgagttttctagggaccaaattgcagtagaaatcccagcactgtgggtctctgcatcttccctgtagggcagtggccaaagatcccaatggcaggcagagatgaggtggcaggctctcagtatttgttttttttcttgtattccatttgttaaagtattggatttctttccagtggtgtgagagtctgaggtgacataaactacatattcccaaatataaagtatgaagaataggagttgaatttggcaggatgaaggagggactaatgaagtacactctggaatttgaaagcattaggagttgtaattatgtgttacatacacaatggtcatgatgaggagatgagaacagtaacatgtagatttgttaagagttatgtatagagaaattaccaagatgtcactgagactagtaacattcctttagggttgtccctgggtaccactgttgacatatcatttgaaggtcttaacatccttgagaaaacttgtcagttattcttggtggcttagaattcttcaacatattctacagctgcaaacacaagtaggcccaagaaataccctggttagaaaatgtagttaatgcacattttgtgttccgagataagagtggatgacatttaaataagcaagttagctgacaggaagaagaaacgatcagttagttatcttggtagtgggaagggtggcactgaatgttgcagatagtgactatctgaggccgatgttgtgtaagtggtaataagaatttaccaagtgatatgggttggctctgtgtcctcacccaaatctcatcttgtagcttccataattcccacgtgttatgggagggactcagtgggagatgtttgaatcatgcgggtgggtctttcacatgctgttctcatgataataataagtctcacgagatctgatggttttaaaaatgggagtttccctgcacaaattctctctctttgcctgccaccatccatgtaagatgtgacttgctcttccttgccttccaccatgattgtgagatctccccagccgtgtggagctgtaagtccattaaacctctttttcttcccagtgttgggcgtgtctttatcagcagtgtgaaaatggactaatacaccaagacaattgtaagtaaagaaagacagatttattagagaaagtatgaaagtatgtttcaaggaagtaatgggcaggtcagcaagagaggagctgactgcaaggagacaaaggcctgctgaagattttataggatggtgcttctgttatgtgaagagggctttgtgcagtactgataacactaaggtttcagtgagctaatttgcatttttctatcagccaagggtctggtgatagctaggcacaggaagattgtgagttaaatgtgcaagagggctatgtgtcctggaccatgaagaaaggcagacttataacttacctgttttttctttttgctttcctgtggtcctgcagtctgattccttttcccaaattaggacttcacattgaaaatatattatagccttaggggttggctgattatttctgtacagctagtagtctgggggtcgtatcccaggacaggtccattttgactgaccggtagagaagaggttctgcctaaggcaggatataaacagggtatccaaattcttttctaaactgagatatttttgaaaaataaaagaggcgctaataacaggcagcaactgtgattgtaccagtcaaaatagaatgtaaaatcaccctaaatagaaatacagaagggtcctcagaccacagcaattttgttcatggctttgtggaccagtattactatccaagtgactcctctgggggttccctggcataggtggaagtgagccactggttcttggaacagctctgaaagtggtattatattactgagaggaagggagcttagtgaggaaatccattatcaaggtggcccaggggaactgaatgtttggcagggatcacagaaaacctttggcttttcccagtaggtgtttgttcttctgtatattttgtatatcattgtattccactacttccattttttgacctagagttgttagaagtcatgagtcaaggaaagtagaaccttgtgttcaccaaaatgaatgaataaacagagggcagg

SEQ ID NO: 95581 - DNA, 48188 bp, Homo sapiens
ataagaaccaatctaggtggacttgactttcatattataatctgacagacactgtagataattctaaaattaatttcaaactctatatcaatatttgtcaatgttttctgagtctttactagttgtctgaaagtatgctaaaccctttatatgtattttttcatttatcctcacaataatcccatgaaagatgttactattatctctattttatagaataggtaactgaggtttaaaaagggaatgcaaggaatacactactgagtgaaaggcctagactaaacacggtctgaatgacatcaaaatgtgagttctcaatcattataaaaaatcccctctgttcagttcttctcctccagaaatttatttataacttattaccatgtgtagatgtatactcattcattcaatatatatttactgagcatcaaacactgttctagctgtttgtttcacattagagcataacacagacaaaaaaatcctgcctttgtggtgcttatactctaataggatgtggacaaaaaacatcataataaataagtaaactagacagttgtgttacaaagtgagcaatgctacaggggcaaataagcggataaagtgattagaaatgttggttgtagtttacataaaatagccctcactgaggaagtgaattctgaacaatgacttcaaggaagtggagccagagccacacagctatctgtaggggccaggggtacggagacgaggaggtgaggctggagaactaggggagtggtgtagatagtgggggtatgtgtgtgtggctaatatacagcctggtagttcgcttttatgaattttggcttttgaatgaaagggaaaccactccccttctcccaccaaatcttggctagtttagctatgtttccctaaaaaaccttaaagggacactgtaagtttttgtttttgtttttgttttttatttgagacggagtctcgctttgttgcccaggctggagtgcagtggcacgatcttggctcactgcaagctccgcctcccaggttcaggccattctcctgcctcagcctcccaagtagctgggactacaggtgcccgccaccacgcccggctaatttttttgtatttttagtagagacggggtttcaccgtgttagccaggatggtctggatctcctgacctcgtgatccacccgcctcagcctcccaaagtgctgggattacaggcgtaagccaccgtgcctggcctgtagtttttttaaatgcaaaaagagtgaattatgtatccctgattctacctttttagcaatagactttggaggaaggacctgccatatacgaaaatgggttagaaacaaacagaaagtttacacatacatgcacatacacacaggcacttaagggaacattctgggagctcctttacacaaaaacgcagggctctaggtgacttctttacgacagtccatattgttactgattcaatctattaagctaggatgaatgacaataaaaatttccacactttacacagaaaatagctctagatttgttttttatgcatttttacatcatatgattaacatataatgtatggatgagtacttaaaatcactgggtttataaaaagtgactttttctctaagtaaacaagtgtacaataaagtaacttcaaatcttttaaccttagtaaatacaggtccttatcctaaagcaatgttatctttaattatcacttatttgtgaattgttagaaaataatgactccaatcaattaagagtctgagctctacaaatattaaccaagatttcctctaacaaaggcaatttctgggaacatgtaggttaaaaggccagcttcatagtaaaataatattcttcattcacagtaaggtcagatggagtttagtcagtcaccctgatgtcttcttttcaatacacaaactgcttaaacaggacaattgaaggatgacttctcttaaatgtaaggtaattataatttgtccgtaaggtaatgcagtgactcaactatgttattacttcagaataaaagtagcatatgatgtgtctatgacaatgaaatggaaaagccatcagtattaatttcttatgactatctgcatctctctcacattttatgactactgactgtaggtctcaaatataaggaagaatttgccagtaaaaatgagttactggcaaaggttataaaaacatcttaaagatccttcataaaagcataaatgttcaccctcagggatgacttggcatcatctgacctgaaagcaagaatacaaagtagaaaactcttcaggtctaatctatccatgttattcttgaagccaaaaaaggctaaaaatctttctttttttcttttgtcctataatcacctttctctttaaccatcactctctcttctgctagacatgagactacaaatttgctgacataaaagaatttgtcctctaactgctttcattatcattataaaactataatatttgttaaaaactaatttgaaatcgttttacagcaaaattttcaaaatccagcctaaattaggtgaagcaatgatatcatttaatcagctatatgcctaggtatgttttgttaatctattacctaggtgaggagtttatgtttcaagcaaaatgtaatatgtgtattgatggctgcaacttccctggaaatgcatcaacaaataagatgggttgacatctgggtaaaaggataaataagtgataaagcaaaaacagcaaaatgttaaaactttagaaccttggaggtggctatatgggtgttgactgtgacactgtttcaacttttctatatgtttgaaatttttcacaataaattgttggggaaaatgtaatcacatttgaaacctgttttaaatggcaagggaaaaatgtccaaatcccacagaattctgcaaaatccaataggcaagatttttgcagcttatgtttgttgagctgaggaggaaaaacaaaaaagattaccataatccctttatctgtctacctccagaaaagtacaaaaaatttacactcttattgagaaataacggcaggtgaaaggtttgtttgttaagaattctccgtggtaaaactaagttcctctggctacattttgaagcttaaaaacaaattattactgttatttcaggcaatgtttcacttccttgattacccagaataactttattttcaatatagatatatttcctgaaaggagataaaccacaccttcttcagattacttaatcatcctttttggcagtgtccttgcactgtgaatctacctgaaattattatttttttaaatctgaaaacaaaaaacataaatgatcaacacattggaaaatgtgtttacctactcaatagcatgcatatgaactatatgttttgtgtgttgcaagcctttcaatacaaatgaccttctaaagtggcatgagacaggcatatttatatttgatattccattaatgatttttttggtagttttttaaaacataccaccctctgtattaataaagatggaaaaatacgtagctcagctactagtggataataatgatttattcaacaaacatttatttaatacctattatgtgcaagggatagtgctaaacctaagatgagcatacaaataagatgcagtccctgaattaactaaatcaatagtttggtaaagaagaaatacaaatgaacaaatataaaatctcataaattggttagtaagtatatgtagagtaatactgtaatgaagaggagaaacctaaattagcttaggggggtgagggtctctgggaaggcttcctgaacttggtcttaaagaatgggtattagtgatctaggcaggagagaatgggagacaatattctatgatgaggcagcagcgtagaggaacaaagcagcatgttgtgggcagagaactacaagcaattcagtattgctggagagaaagcgagaaagctcatggtatggagtggagagagatgatgctaaaaaggtaggcagtggccacaccacgaatgatcttgtggggtatgttaacaaacctggactttctcttggcctcagaaggatctagaaggggtgtaatattttcagattgttaactataactctctgacccccttgagtgaaggagacattattatcagctacaagagtgacaaaatgaggacctgagaatcaagatggtgatagacggtatggtttctattgagatatacaggcagacatgacagacgatgtgggggtgactcccaagtgtctggctggggttaatctgttgatgacaatactctcctcacccacccccacccccgacccatccaagtagataatatggaaagaaaagcaaaatggaaagggaaggtgatggattcaaccttggatgtgttgaatatgcttccgggttatctaggtgaagatttccagcagaacgttaacatgaagccaagagggaggaagtctggataggaggctgaaatttgaatctacaaaatattagcgatactaggaattctgagtgaacagccagtttttgtgaggttttgtttgttttacttaagccattctaataggtgggttgtggtagctcattgtgatttaaatgtttattttcctaatgtctaatgatgtttaggatctttttttgtttgtttaagatcttttaaaataattatttgctatttgtgtatcttctttggtgtctattcaaatcttttgcccatttttaaacaacgaactgttttattattgctttctgagtgctccttatatattctccatacaagtccttcatcagatacatgctttgtaaatattttcagtatgtggcttcaagtcttttgaagagcataaatttttactttgttgaagtccaatttatcaatttttttcatcacgcttttggtttaagaaatatttgcctaaataaggtcacgaatatttcctcctatgttttcttctggtataggtttaggttttccatttacatctacgatccattttgagttttttggggtgtgtatgtggtgtgaggaatagatcaacgtaatgagaggggataaaacacagccacgaagagtttatagataggaagtgcaaaaaggtggatggaacctgggaatgaaaaaaagccaaggttcaaggaagcggagttgggcattgtcggggaggcaacaggaaaattctgagtaaccaacactgcctgctaagaaaagcaatgacagctgtcttttttaacttggatgaggtcaccttgggaagagcattttcagtcaaaacaaatcttccctatttctaattacatgtaaccaacagctttataagaattcccccggcagaaacacttgagaggtctgaaatccctgagcactattaaaggtcacttctttaggtacaggaaggtctgggattcctgacactgagggtgactgaaacatccttggggcactccaggcataaggtcttggggacaaacccaaggagtcattgccttgttgggaaatcagaagcacactcactgctgggtttgccaatctcacgcttcaccaggaagacacctagttgaactacaggaggatgagaagactggaattaaaatctgtgcactcggccaaatccggggacaaatcaggaaaatccttcccagccctccctgtttctggagaggaggagtagggcgcagggcccctcccgactctcttccacgtggctcctctcgagcgaagagctactgcacttacccaggcttaggaagcgggtgtttaagccatgggttagagggctcgtgagcacgcccgatcctttccctgaggctatgaaacggtggctccacggactcctctcggccgactgacctttcgccgccctgccccagcagccggcgggtttcttcagtggagccgggctctggtctccgcagcccagtagcccgctagcccggccccctcccgctagtcgtaaagtgcagtaaaggcaccagcattttgcggcaccgtaggtgaggccggcggcgtgggccttttctctgcacggagccggcgcttttgcagttgcttctgcggaaaggtggtagttaagaatttgtaaaggccasagaactacctacgattctctcagcgggtaattggctgctcctaggtttgtgtaacaagaggcaaaactggtagggttgtttaaaacctcttatcccagttcttaagcgtgacataaggttcccaaacccctccttgtgacttgcctcttctcttgtkctactttggttgtcatcgtgttcatcactagattttagatgtcctcggtgttactgacggtttttctgtccacttcgtcttgcagtctctcttctcctcaagtttgaaatgctttatctcatcgggttgggcctgggagatgccaaggacatcacagtcaagggcctggaagttgttagacgctgcagtcgagtgtatctggaagcctacacctcagtcctaactgtagggaaggaagccttggtaggtgctgagcgttccccagcctcctgggaagaaagctatctaacatctgattttcatacactaagctgaacagaattttcaggtctgcttgtttaaaccctttgaaacgcatcccttgttcattaatgatctgaggagcagaagaatggaaattttacaccaaccaagtgacttggaaaatgaaagggtgctttgtcctattttacaagtctaattttgtggctttctccagtaaataggaaagctattttatactcctgggggatagttatcaaaaccccttatttcatgaggtagtcaagaaaccctttctgagttgagtgctaatgaggagctgacacagccttaatgagttggttatatatattcaaaaaccaagctgaaagcttccccctttgaagtgtgtccatagggaatggcgattgcctttttgtatcctatccagagagatcttatcttaaatagactatctyccaataaggcttatactgatacacttgtatatattgagtgagcctggacttaatatatamaaatgtatgagtatacacttacatgagtatacactaagtaaccaaagtatttgttagtatattatacatttatagttggccctcataagggcccagtaaatttgggggaagggtcaacttcaggttcattgtcaaactctaagtagaatgtaaatcaaaggattaatacatatgttatgggaggagggagcagatttattgtcatgtcttccaaacaaaaaatagacttaaaatttttaggcctcagattactttaaaatcttatagaaggaattaagaactgctacttgaattggccatgcatttaaataaaagttgtgtgtaaagaccaactttgatatatacatatatgtggagagagagagaaaataagtcttgctctgttgcccaggctggggtgcaatggtatgatcatggctcactgcagcctcagcctcctgggctcaagtatcctcccacctcaacctctcgagtagctgagactacaggtgggtgccatcatgcccagctaattttttgtattttttgtagagacagggttttgccacattgcccaggctggtcacaagttcctggactctagtgatctgcccacctcggcctcctaaagtgctgggattgtataggcacragcaaccacacccagcctaaggccagctttgatttaaaaaacatttttttttctcattttttcactcttaggatagaaccaaaatatctaagctcgaaatgatggaaatgtgcgtctctaatcagtgattaaggaaaagtaaaaggaacttaacaccttcaagaaaagacagacaaataacaaaacagcagtttgatagaatgagatatcaggggatggcatagaggaaagtttggwtatagttttatctttgttacatgttaatgtgaccttggacaagtcctttaactttagtgtcttttttaaatggggtaaaaaacatctactttaggtgttcagcataattcttagcataggttcttaactatggtatatggcacaaaactgttcagaaatagaaattgtcaatgttcacatttccaaacttctctgaacctcagtttcttcatttgtcaagtggcaattaccagttggagggttatgtagtgttttattgagatgatgtatatgaaagtgctttgtaaattttcagtgctagctaaatgttaattttggctgctgttattttgtaaagtatttttttccaaagacaaaacttctggagttactacttacagagtcaagacctgaagctggacccagccttacctacagtaaattatgtgtactttgttaaggtgctggaatatctgtttcttcacagtaataagtactgacatttatagaacagttacagaacagttactgtgcactgttttaaatgctttacatgtagattaggattattattctaattactgttcattttgcagggatagagaagttaacaaacttgcctaagttcatgcagatagtgaatgatagagccaggagatgaaccaaagcagtcctgagttgaagtctgccactctttttattattattattatttattatrtttttttattttgagacggagtcttgctatgttgcctaggctggaatgcagtggtgcgatctcggccccctgcaacctctgcctctcgggttcaagcaattcttctgtcacagccttctgagtagctgggattacaggcgtgtgccattgcgcccggctaatttttgtatttttagtaggatgagatttcaccatgttggccaggctggtctcgaactcctgacctcaggtgatccacctgcctcggcctccaaagtgctgtgattacaggtgagagccactgcgcccggccgaggtctaccactcttgacctctacactgtactgtgtctctgtattcttaaggatagataatagctacacaaagtttaacttcacagaacacctacagagaaggtaggattcaagcaaaatggtcaatgctggatcctgccctgcttaataatttgttcatgtactcatttgtttgacagatattattgagtaccagataccgttgcactacagcaatccttataaattttaataactcactcaaagttctcagtatgtaagaaaccgtattatttatctatgcatccagttttactccatttgaattacttattacttctcaggaaatcagttttaagattcatgatccttcattctgtactggctgacgagatgaaaaaaaagaaaaggattcatgatcttgcataatagcccgtaaccactatcagatgactactagcttactagctcactctctactggatttgttctctagagttgagctgcagggaattaaatcacaaagcagtttgtttgcaaacttcctacatatttagaattcagttactgctcctgcaactctgcctttttagcagaaactaaggaatatagttttaaattagtatcttctgcatttatgtaggaatgttcactggttctgtaaacagctaattttctattgtttctcattggtgctgccttttttttctagctgagttgccatatgtttaaccattgaaaatttaataaaagctaaaccaccatgtttgtttaaacttattgtttaatatatttattctgtattacatcatgtttctgaagtagggctcatgtgtacatattccgcattcatcctacagtgttctatttggcctttagaaccaaatttagaaataaatttaaaatgcaaaaagcctcagatgttaagagttccgcctcctttgggatattaagacagccccaaatacagagtttaattgcaacatgacataaagtactggcttactgatgagttgtattgaatgatctgcatttgggtggttgccaacatatgcaccagtcccaaacaaagagtgtgtgtgtgtgtgtgtgtgtgtgtgtgtgtgtgtgtgttagaatggtcacctgctgtctctttatcttgatattggacttatatctgtaggaagagttttatggaagaaaattggttgttgctgatagagaagaagtggaacaagaagcagataatattttaaaggatgctgatatcagtgatgttgcattccttgtggttggtgatccatttgggtaagtcaaggcagatattttgagtttttaactcatttacttttttttaatcagtaagaattattctattgcatttaacacttttacctgccaggtcctgataaggaactctggttacttaagcgctatctaaaatgtcatagtttaaactttcatgatctttgagattagtgaagaaaagctagttggtaaatatatcatcatatgtatcactacattatcaagtgtcaactctaaagtttgtatcattgcttctgctgttttagaaggtcatgtagggcaacaaatgccttaactgctatatcattattaaatagttcattacattatcaaaagtcatgcctgccattttctgctgataatttcaggcatcttcgacttcttttgtcctaggttttttttccttttgtaatcatctactatttggcaatactgccgtsactttgcttgccttgaatttatcatttatcaagtctctgatttcagtttcttatatccattgggaaccctgttctttgtcattaccacgaagatgggcatctactgcctagtcaagcatcatcaatctctaatgtcaagccaaacagaagagttctttgtctacagctggttacctaagatttatatcacagatttaaggaacataaggaccatgtaagaccttggaggggactaggaatttaatttaaatacagtggtaaacttttgcaggattcaaagcaggaaaaagtcaaaatctgattagcattaaaaggtcactttaagtgcttaggtaaatggattttagggaggcaagaacgtttttggtggaaaagagaaaaagatgggaacatatttagaagaagaatgccaagatgaatgtggtggataaggaaaaggaaaggagtaaatctgattcccaggattctagctttacaaatgagtggttggtagtgtcacttgaaaactggtagagaacaggatttggagaaacaagaattggttctggaaatatgtttactttgagatgtcaagtaggcagttagctgctgctagagcttgggatgggaggtcatcctagataaatggcttttgaagtcatcagtatgtttatggtgtttaaagctggaggaatggatagaatcagcttaggagagaagagtgggaaaagaggacctaggatggccctaggaaaccttggaatttcatcgtgtacctggagccagaggaggagggagaaaaagcaagagagtatgttgtcacagaagccaggaaaagagactattcaaaaaggaaagactgaataccttcaatataatactgaaagtttgactgtaagatgaggacagaaatatgtgtatgaatttaaagacatgatgtttggagttgattagtggtggttttatggaggagctggaacttgcgctgggtctggatagggttcaacagatggagattatagggtgggccaggagaaaggtagaaggaagaatgctcatataaatgaaaaaactgaggcacagagaaagtaccttgatgtaattaattgctcccatgctcaaaaaccttcagtgacttctcatggccttaaatcttgaagtctttcttttttctctagctactctttaaccgctatgctaraaccaaatggtacaactttccatttcataagtgttttgtaatattcttcccctatttctttgctcaagctttttccttaaaagagttcttctcagttcctaattatacctaattgtactataaaattagtatacagctcagatgctacctctttcattcctgttttattccggagtgccttttttttttccattttagacttctttaatttgccctttcttagtgattcatcgtatatagccttgtatttgaattcagatttaaggaatatttactgtactgcagttattttttatttaccggcagattatagttaggatatgatagttggaaatggcatgatggggaatgtgtaattttaattggaatatgagtggattaaatggaggagaaatcaggtaaggaatatagaatgcagcaaggcactgaaattcttagatatgagcaaaaaatatcccttatttaattttaagaccccttcttatttaaataaaayatataaaaagaagattgtttaagatgctgaatcttaaattctttttttcagtacttttaaaatggtaaaatgacacatgacaaaatgtgtcattttaaccattttagtgtacagttcagtggcatactaagtacattcacattgttgtgcaactatcagcactgtccatctccagcaatatgaagttcttgaagacaatttaaagtcatagttaagtaagttcatgtagtctcatctttgttcttttacccaggttattgaaaggaatatggaaatagatcacacaaagaaagtaaatgagtctaaaaatatatactaaatcaatagaacttaatcactgtgagagttgacagtctcaaacattctatccctaaatctctgcataagaagtctttattaaacacactgtttctaatgatggttctgttttattattccattctgtatttcaatatgctctgtaactatattattataatgaatacaaaatttttatccctatgttgtatgccttttccttagtggcatccatatacagataatatgtcctgatgtaggctgactgcttccattccatgtaatgaatgtgaacagtgcttgatacctaataactataaaatcaatggcagcattattattagtctatttttcttcaatataaataaagctgtcacatgtaaatttatgtatatgataccttcctgcctcccacttctttatccccatgttttaggttgtttccttatggtagatcctccaaaataggtttttaggaataaaatatcaaaaggtgtggacatggacattttgtagaataaagcatattgtcaattatttttcaaaaggatagtgccaagtgttagtgcttccatagttcatgaaaacgtcatttgcgctatatcattgcaaacattactaaatttctggcccaccagccacacttatgtcaaaaacggagacactataaaatttaaaacaaacataccagccggcgcagtggctcatgcttgtaatcccagcaactttgggaggctgaggcgggtggattgcccgagcccaggagtttgaaaccagcctgggcaatgtggcgaaaccccatctctactaaaaatacaaaaaagtagccagacgtggtggcaggcacctgtaatcccagctactcaggaggctgaggcaggagaattgattgaacccgggaggcggaggttgcatgagccaagatcgtgccactgcactccagcctgggcaatggagcaagactctgtctcaaaaaaaaaaaaaaaaaatcaaattttgtatattcaaattggtcacctttgtgtactttattttattgattccattaatcaaaacatttttggatctcctttcttgaaattgcctttagaacaatttcaagtaacaagcatgttattacagacagatttattactatttctgagcatacatacatatacacatatatgattttagatagagccatatacctagaaatagtaaatttgtttgtgtgtatatgtatgtgtctactcattttaaataaacttgtgatagagatgtaattttgarccagtttttcatttgcttaaataactcaccaagtaactaatttagttttctttactcttaatgttaagtagtgagattctgttgaaggtgatattaaaaacaattctttataattgacattcatgttattttttaaaagcttatttgaaatcaaattaatgattatttttcataccagttttattttatgtatgtgattaaaaacaggcttccctggtgggcatttgttaatttgttaatatatatctgactgctccatggggtgaaagccctttatcttcctacttggtatgcattgaccagtccacaggttctacttgtttgcatgtggtttctcagacatgctaatgttgctttacccagtagggcctggaatttttatcaggagggaaaaaggcctttaaaatgaagttctaaattgataagcggttacatttcactgtgtccatgtttatatttatctatagtctctctttactccaatctacctacttacaatcttgagattttatcttaaaaatggaaaggcaacaggtcaaatatgcacacatacgtacatacgcatacacacatcctaattacacacagtaaccaaataaaaacagttaaaatgactgctggacagatataaaatccaatattataggagataggactctcatataaagactgagtgacaagctgtgaaaatttatgtacaggcatacctcgttttattgtgttttgctttatttcatttcacatacattgcattttttaaaaattgaaggtttgtggcaactttgcattgagcaatcctattggtgccatttttttctgacagcatgttctcacttcctgtctctgtgttacattttggtaattattgtgatatttcaagctttttcattattacatctgttaatgatgatttgtgatcagtgatctttgatgttactgttgtactttgggttgccacaaaccaagcgcatataaaatggcgaacttaattgataaatgttgtgtgtgttctgactgctccccaccaaccagccattcccccaactctctctctcttcttgggcctcccttttaccagagacccaacaatattgaagttaggtcaattaataaccctacaatggcctcaaagtgtttaagtgaaagagtcacatgtctctcactttgaatcaaaagctagaaatgaggaaggcatatagaaagccaagaggctgggtgtggtggctcacacctgtaatcccagcactttgggaggctgaggtgggcagatcacctccagtcaggagttcaagaccagcctggccaacatgatgaaaccccgtctctaccaaaaaatacaaaaattagctgggcgtggtggcgggtgcctgtaatcccagctacccgagaggctgagggagggacaattgcttgaacccaggaggtggaggttgcagtgagccaagatcatgctactgcactccagcctgggtgatatagtgagattccgtgtcaaaaaaaaaaaaaaagaaagaaagaaaaggaaagccaagataagctggaaactaggcctttttcatcaaacagccaagttatgtatgcaaaggaaaagttcttttttttgagaaggagtctcattctgttgcccaggctggagtgcagtggcacaatctcagctcactgcaagctccgcctcccgggttcacgccattctcctgcctcaccctcccgagtagctgggactacaggcgcctgccaccacgcccagctaactttttgtatttttagtagagacggggtttcaccgtgttggtcaggatggtcccgatctcctgacctcgtgatctgtctgcctcagcctcccaaagtgctgggattacagatgtgagccactgcacctggctggaaaagttcttaatggaaattaaaagtgctactcttacgaatgctctaatgataaggtagtaaaacagacttattgctgatagggagaacgttttagtgttctgtatagaagatcaaacctgccacaatattcccttaagctaaagtctaatccagggcaaggctcgaactctcttcaagtctatgaaggctgacaggggtgaggaagctgcagaaaaattgttccaagctagccgaggttggttcatgaggtttaaggaaaaaagttgtctctataacataaatgtatgagctgtggaaacaagttatccagaaggtctagctaaggtaactgatgaatcactacacagtagattttcagtgtggatgaaacagccttctattggaagaggatgccttgtaggactttaattgctagagaggagaagtgaatgccggacttaaaaggactggctaactcttggtagggctaatgcagctggtgactctagattgaagccagtgctcatatatatagccttatgaaaatcctaggtcctgtaagaattatgctaaatctattctccctgtgcgctgtaagtggaacaagaaaagctgaatgacagcacatctgtttacagcatggttcactgaatattttaaacccacccttgagacctgctgctcaaaaacatagatttctttcaaaacattattgccattgacaatgcacttggtcacccaagagctcaggcagtgtacaagaagattactattgtttttatgcctgctaacccaacacctattctacagcccatggatcaaggagtaattttgactttcaagtctttctatctaagaaatatattttrtgaggctgtagctgcccyagatagtgatttctctgatgagtctgggcaaagtaaattgaaaaccttctggaaaggattcaccattctagatgtcatttaaaatattcatgattcatgagaagaggtgaaaatacccacattaatgggagtttgggaggggtcgattccaaccctcctgaatgactttgagggcttcaagacttcactgcaggaagtaactgtagatatggtagaaataccaagagaactagaattagaagtggagcctgaagatatgaaggaattacttcaatcttaggataaaacttgaacagatgaagagttgcttcttatggacaggcaaagaaagtggtttcatgagatgaaatctattcttgatgaagatgctgtgaacattgttgagatgacaacaaaggatttagaatatcatataaacttagttgatagattactagcagggtttgagaagattggctccagttttgaaagaggttccactgtgggtaaaatggtatcacacaatgttgcatgctacagagaaatctttcatgaaaggaaaagtcaatcaatgcagcaaatttcattgttttattttaagaaattgccacagccacccccatctttagcaaccaccaccctgatcagttagcagccatcaacatggagccaagaccatccactagcaaaaagattaaactcactgaaggctcagatgattgttggcattttgtagcaataaagtgtttttaaactaaggtatgcacattttctcgacataatgctgttacacacttaacagactacagtatagtataaacataacttttatatgcactaagaaaccaraaaaattaatgtggctggctatattttgatattcacattattgtggttatcttgacccaaacttgcaatatcttcatggtatacgtgtatattctgccttatattttaaatacaaagacaaagtcttcaaaatagagcagtgattctagttatgccctaatttagaattttagagcagtaattttaagaatttaaaagggctctgagaccaaagagcttaagaattgctgctcaagagttaagttgctgagcttatatttcatagatgtctttttcacgtatttacaggacagtgggcaagtaaaggtccctttcttaagtagctgccaaggctgctttaggagtgttacagtagcaactcagcattttgaagggcatgtttagtcttgcattttcttgctaaaaagctcagatgaaagccttatgcaggtgtgtggaagaatttgaagaaaggcagtgctcctgcctctttaattgacatgaactcaggaaatatagctttactgtcttaaaagtgttgtttgctttaatccaatctaatcttttctcactacagggccacaacacacagtgatcttgttctaagagcaacaaagctgggaattccttatagagttattcacaatgcctccataatgaatgctgtaggctgctgtggtttacaggtaatgcaacaaaggaggtttttcagtggaattaaataaaaatgttttatttttccacaaattgaaaatacatttaattgtattttatgaatcataaaacatactactatttgatactaggctgcttagtatatacatagactgaattttttaacactaatttttttatgctaggttttcccccttattggaatcgaatgtttagatttagctagaaaatgattttaaccttaaatccaacttgtacttacataaaaaggaaaatataaactaatccaaatgacatactcagcattgtcgaggcccatgatttttcatatagtattgttttgtgtgctgtcaagagcattgtgatgctgcatttcttaatagaatcagtataaaagctaaaagccagtgatatgggcttttaaaccaggtttgcagttattgatgtgtaaagttagttatttttgtgtccaacagtcttggttctgaggggttagagtgccccacaattgtttccaagatttacttcttagctactatcatttatatctttatcatttatatcttagctactatcattttccaagcttggtgtttgtattctgatgttcacacatggataatccatgacaactatgactgctgcttggctaacagtggttttaagacatcatcaattgttaagacacattcctattttcagatatatcataataggaaaacaacatgcatcttagaagctgtgaaataagtatttcccagtgtgtcttcctgaaacacataatttaaaaatagatattttcaagaagatacattagcatcaggcaccaatgctatgtctgtagctttagaggactatattttctgtatgacttggagagaatagttcaatttaattgactaatactggctttttatgtcaaaatgttgcctgtgtttatgaagaactagagaaaaagtataaatgattgacctgacctgacagtattcaccacttgctcttagttgttatgtttaaattagcatggaattttgctatcttttttgtccaaaatgcatactttttaaaaaaccttgcccattcaagtctttttttcccattttgaaacccttctgaacatttctgtgttggagtaagtcaaatgctgttcatagaactataaaatgttagcactacaaagaatgctatagggatggagaaaatgatgccaaaatatgttcccaaggtcattcaggtaggtagatggagctaaaactcttgatccctagtccagtattcttcccttctgggggtgtccaagggagagagtacagtcatgggttcttagtttctgttgctggttcggccagtaaagccccttcctcatccctcttttctgcttatcactagagacagaaactaaaaaccatggcttcaggctgctaaaagcctaaaacaaaacaaaacagaaaaacaacaacaaaataaggcagactggacaagcttgtgacaatgctgccttttaagaactgatgacggatggctgggcgtggtagctcacgcctgtaatcccagcactttgggaggccgaggcaggtggatcacctgaagtcagaaattcaagaacagcctggccaacatggtgaaaccccgtctctactaaaaatacaagaattagctgggcgtggtggcagggacctgtaatcccagctactggggaggctgaggcaggagaatcaccctaatccacaaggcggaggttgcagtgagctgagatcgcgccattgcactccagcctgggtgacaagagtgaaaactccatctcaaaaaaaaaaaaaaaaaaaaagaattgataattgctagaagaaagaaaaaaaggagagaaattatcatttgataaataaagatatgtaaaccttaagctaataggacatacatttttaccatatttcatataattttgtgtcttgtaaagaaagttaactagccctttctccatattttgctctaaattaagctatttttaattaatttttttgcttctttattaagcataaaaatagaacacatcccatataaatctgttttatagactggttaaaactaaacctgggtgaccctgtccttctgatcctccacactgatagacaggtaaagtgtaattgttctcgtgtctaaattgggtgaaggtatttgagtgggaatttacggtgagaattagcagtctttatgtaagcacctacagtcatatccacatatattatttttcaaaaaactttctcacaattgtgtatgggatttctctaaacagccacacaccattttccccccagcttagttttattatctaatctggatatgaaatggctatttgtgtgaaaaacaggaggtgccttttaaggttctgtcttatatagtgatcacatttctatgaagatatacttcttataccactgaaattattcatatcagaagaggtaattrttgattcatttttgtacagttttttaayataaaaagcattaaaaatcatatgcatgacacacttaaattttaaaataaatgtatagatatcctgcataatgcaagtactttgacaaagtcttcttccttataatagctggcctttttctctttactttttggactagcgcttatggaagaaaaaataacctaaatctgtggttctcagacttagtatttattagaatcacctagagggcttgtaagacaggttgctgggcttcatattcagactttctgatatagtagatctgggatggggtctgagaatttgtatttgtaacaaagtctcaggtgatactgaagctattgctacaggtaccatactttgagaattaccaacctagacaaattaaaaacttagaaagtgaaagaactgtgttgtcttttttttggcatggcaggattggaagagtaggtttttaattcccagtatacacttgttaaatgtaggatgttgagaggttatcttgccatgctctcttgctcaattttttaaaagggagataagaaccactgtgaaaaggcattctgtcatctccatgaaagagctttccatgagttcaaaaacagccatcaagttattgaacagagtagattaaagagtagcagtatgaaatttctaacctagaaatagacagacttttcagctatcaatttatcaaccccctttgaactattctgttgtttttgttattttctaaagaaacaacatgcagagttcagaatcaaccactgagtattgttcattacctttgtagtttattagccaacagaaaatttttgtttatcactatgatggtaaaaattgttgtataactatctaacactccttcatacacacagacattcacacacacagccagttgatacrcactatcttacagacttgccataaaataaaattctctaccacaaactccatattcctgatgaaaattttccttgtaaaataaaaagtgtattagaggcttccaagttagacatctttaaagagaatagtgatccattcattcaacaaatactgttaacctacttatttttctaagtgcctttggatacagtgataaacttgaccaatagggtccttgctctcaaagagattctattttagtgggcagaagagacaacatcaataaaatgataaatattagataatggtaagcataagaaattcaagtagactggtatttagagagtgactaagtcactactgaggtcgggaaggtatctctaagaaggtgacatttgagattcgatatgaatcaagaaggaactagcatattccatacagaggaaacagtgcaaaggccctgaagtgagaatgagcttggcttgttaaaggaaccaaggaagggcttgttggaccatagcaggcaagggaaagagtgacctgaggttggataggtggatagggctgtatcactaggctctcattcaacattaggagtttagatgttatcctaagtgacataaattgacattgaagggttttaagcagtataaatacttgatctgataaattttttaaaacataagctttggccaatatgtggagattgaattactgccaggcaagattggaattgaggaaattctctaaattacagtcatttagaggaaagatgatggtggcttgtactgtatggagtagggcataagagaagatttagaaagtgaacttgtaagagcattttctattaagagaattgagatttggggagatgtagagagccatttctgccttactgatagtcctaggaaaggaattggggtctttatgctaatgggtccttttccaccatctccactaccacagttattatggtttgtacccccaaagacttgtctataggcctggattcttctattactactgctcgattggcttcctactttgattggttctgttaaacttgttattgctagagcagttgcctcctgtcactaagagccctgtgccagtctttctgtgctttcaggaccatagattaatcatagaattgattatgtggaagagtatgattaggtttatcttactcctagactcttgagggtatggatgttgccttgaagtctctactaatgtcttgggaagagttaaagtcatggggtaggtattaaatacatgtatgttaaatgaaagaagccagacatagaagatcatgtattatttgattctgtttacatgaagtgtccccaaaaggcaaatctgtagagacagaaagtaattaatggttgtttggggctgggcattacagggattgactgtgaatggacataaggggtcttagttgggtgatgaaaaatgttctaaaactaagtatggcagtggttgcacagcgtggtaatttactaaaaagcattgaatcatatgcttggaagagttattgttatgtgatgataatgcagtaaagtggttaaaaaaatgaattatacgaagttagctagataggcaagagggcagaaggcattcctaacagagagagaagtgtagttaaaagagagagtcttggaagcactttagggaatctgtaaggtattgcagtaacacacacacacatacaaatatgtgcatacataaataccaaagaaaccttggctgtctagggagtcagttaacacgaggcttagaatatatctatgttgaataagaatagactacatattgggtagaattggtagaggaaaaatataatggaaaagatttagaattgaacttcaacttaaaagcccttgttttacttcttgcctaggcagtaactaaggcgtcatcttctctggatctcagattactttactgtaagggtatgtggtgaggattgggagggagactggatgagaatgttggttttcaaaccacaccatgatgtatgaagatgctttagggattctgcagacaatgaagtaatgacataacactaaataacagagatttagatcctcagggagcccaatcattatctttaactctattgatgttttacttaagagtagttcatttagaaaaaaagaactaaatgtacactaagtgccagtaagatgtatgaaaattactaaactagataaggtctaatatagatttggaagccaaaaagccagcctcttttccaacatttagcaaagattatcttgactgagatactttaggtactcaaattttcattcaataaattttaggatttttcacattaaaataatagttataaacacatatactttaaaatcatgtttttaaattcctaacatatttctaacacttgtatttgtttaacattttgcagatttttctaatgaaagaaaagcctatttgtatgtctaaagccaggcatgttggttgtgtttagatgtcctggtaatgaaaatttgcttaataaattgaggatcactcttaataaatccgagatttttctcaatacacagaagataggagaataaagcacttttctttgttttttttttttggtttttgtttttgtttctgtttttttgtttttttcgggggggacggagtcttgctctgtcgcccaggctggagtgcaatggcgcgatctcagctcactgcaagctccacctcccgggttcatgccattctcctgcctcagcctcccgagtagctgggactacaggcgcccaccaccacacccagcaaatttttttcatatttttagtagagacggggtttcactgtgttagccaggatggtctcaatctcctgacctcgtgatctgcctgcctaggcctcccaaagtgctgggattacaggcatgagccaccgcgcccggccaaagtccttttcttgaattcttgagtttaacatttctgcagaagcagttagcttagacatacagaatcagaattgcttccatttagcattgttcctgctttagaagaaccattttccttgataataaatgatttctatgctcacagaaaattaggaagatatattgagtataaaaagaaaataaaaaagcatccatagtaccaccacctagagatatccacagttaccaattttggcacatttcartctttttattcaacacttagtatgtgtatatttacttgatcttataggccaaacaaatattagaaaaaattacaaattctgaaatacttctttgtatagaattttattatctttcttaatcatttgtgtgatagaatatattagttctcttgtagaaatttggtgactgaaatggttttaaarcattttaaaaggcagataaatgagacagttccatgaaaccaggtagcaatgatttcagataaaaactgcattatcagttgtggctgacttcagagaaaaggttgtataatttcctatcattgtgaaatgtttccactttctcttgctattgcatgagtgaccttgagtattgccatatgttcatctgtttatataatgcatttctagtttggaaaaatgtatattactttcagaaagtaacaactcatttcctctcttttttttaataccacaacattcattgtgatagtcagcattgtcgaccttgtagtgattcttatcgttacttttcagaagcattaattggtttcattgttgtccagggactaatgtagtcatgaaaaaccctagcttaatacaaagaacacctagttttagtgttctttgtattaagctagattttatcatctagagttctatatccttccgtggtcttagaagaaaataatctaagctctttctattcttttagtcacttaggaacagtttttgactacctgctaagtcatgagcatatttaattttttttcttcctttctgtttccacttattactggttctaatcattatttttttaaatagccaccttaccatcatttttttcctacttcatagttttctttttaaatcgtaaatataattgtgccattcttctattaaaacaattttggtaaattaatccccatcctatatagaatgttcagttacttgtatgttgtattagtccattctcatgcttctaataaagacatacccaagactgggaaattgactttgaggtcaattgtgactcaattttgaggtcaaattgactttgaggtcaataaactgtggagtttaattgaatcacagttcagcatggctggggaggcctcagaacacttacaattatgtctgtaggggaagcaaacacatccttcttcacatgacagcagcaaagagatgcgcagagtaaacgggggaaatccctttatgaaaccatcagatcttgtgagaactcactatcacgagaacagcatggaggtaactgctccccccctcacctcccccactaccgggtccctcccacaacatgtggggattataggaactacaattcaagatgagatttggttggggacacagccaagccatgttatatatgtttatgactttatcatattataaactctttgatttactcattttcctatctgccattgcattctatcacagtgccatgcatataatgaatatgtcacaagtacttgctgagttgaatttcttatttattttttcccccaaccccctgccttccaccctggagttcgatcttgtctttgaaattatatgctgtaaattgtcattttaaaatttaatttacaagtggctctcatttatgtgtgagaataaatcttgtagctcttctgtctacgtagtcattcaactttatgtacctagtgtgtggccatgtgcatactcttccttagtgtcatcaaaaatcaatgttacatcaatggcatgcaaattgtatgtggggataaaaacaacaacaaacaaaacccatccccaagaacagtattctgtatagaagagaaaactagtcactcttgattatgtggttttgtggtacaktttttgacagttttgctggcttggctttctttcacttcacagatttaactgatttaatttaggatataaatacatgatacttgcagggcttaatagagttcttagcaagtttaatttttcttaacagatttttttagctttaataccacagaaaatatttttatttgttatacaaaataacaaaagcattgaaatctaaaatggagttttacaaagcatctatgcttctaaaaggaaagaaatattgatggctatgagatgagttaggagactgttaaggttattcaggcaagtgatattgagggctcaaaccatggttgtagggaaagaaatgagtagtcagctacataaaatatacagcagaatttacaggaattggcactaaataagatgtcaggaattagatatatgtttagagagaagtcaggcacagttagctatttctgggtaatggcttaatgccattttaaatattgcccaagacttcccgcctctgttactttgttcatagtatctcattctttccccatgttcggcttctccagtcttaaatcttaactgtctttcaaggtctagcttacgccttgtattttcagaagatgccttcagatgccctcttagtgggggaaatgctgaatccttataatgcttagagtctatagcatatttaataataattactactaccyactattgtctttcttgagcatcttctaactagattgtgccttatgcctaatgagtggatgttttgagtttttttgggttttgtcctagataaaacataatccaatataagttaggtaaactgctttctctataggttactccaggttaaaatttaaaaaggcctgtgtttacctactgtttcttacaaaacagctgtttttttagtctttaaatttagatttgcagcaataatgttttggaggaaaaatgatcacagcacaaaggcttatatgaatattataggatggttcaatacttaggcttctgcaatctcagttctcatcactgtgtgactttgctctagtatagttcactggtaagcccttcgattgtgaaacacaaagaactggttcttttgttctttgaggtattgacatatggtgaaattgtttgcataatgttccaggattcactgaagaagtttgcaccacagctacaggagtggttacagtttataaatcagggtcctggagagcagtgcttgtgtgaggttttctttaatctctcaaattagacaattcaaagacactgctacacaaaatgctttagtgtttatatgtgacttgcatctcaattctttcttaagtggtctgtcactttctttttgaatgaagaacttatttccttccatgactgtattcccatgactcttaaagtatttaagactcatttaaagtatgtattattgcatatataatttttttaacagttttaccttgaagcttttttatggaataatactaatatttcatagtttgatctgagatgtgaaaaatcctttttagaatgtaaacagttgaacttgtcagaatgaaatcataaatgtagtttcaagtatttagtaatatttttgagcttactccaataaggaaagcagttggattaaagcaggacacagcattttagaacatcttcattattaaaacattatcattattatatcatcaaattcctaacactaagacttttccatgtgcaaggcactactaggcactctgcatactttgtgtcatttaacccttaaaaaccacatttttatgtttacagttattatacccattttgtagaagggttcctcccaaggattgggaatgttacttgacttgtccatgattaatcatagtaagaaccagtgccatgactgcagagcctttctctgctgtatgagacatgagcaagactgcacaatccatgagagccagagctgtgttttgcctgtcattttaaacctgtgactagcataatacctggtacatagtagatgatctgtaataagtatttgttggctaagtttgcctctcatcacccaataataataacaaaacccctcagcagggccaggaccgatcctggtagcttggcacagagtgaacatattcctggcattccacattggaactagaaatacattgtcacagggaaacctgtcacatgtggcaggaagtttcatgactcaatacttggagttacatgggtctttgtacactgacctgtgaatttgattgctactgaatagcataacttctatgagataatatgtttttaggcagctttcaaatggactttgggagtaaaccttgttggtaggtaagatgtaggctgtggcctatgaagaacakgatgaaccttccctttagaactcaaagtcaccattatgagtgttgattatagtttataggacctcattatgtaaaaactgagaaacgttgagctgctgctctagggaattagggatgaaacacctgaatgccccaccttctctgtttccttcctgcttgtcttcccctcatatcttgctgagcctctgaaactgatttgaaaagccttaggctactggaagcagaggatgactaatccttgctccagaccaggttctgcatttttaattgaagaacccaaggctgagaaaagtgacttcctgaagtcacatggctatttcaggcacacggttaatttgtggcagaggactagatgtgagtctagtgcttaccagttctattataaattatttcaagtactatttaaattgaataattaaatctttatacaactttagtattctgttttatattgtctttgaaaataaatgtcctttgctcagtgctgagataagaactaatattaacctattgtttcacagtttgaataactttttacatgtaatatgatcctcacaaccctaggagtaggaaaaacagaattttatcactattcctattttagatataaaatcttacagtaatatcacacagccaacaagttgcagagccagaattcaaaagtagattttctcacataagatttgaaattggactcacttaagtgagctagttcagccagtctggatcagagaagccagcttcttggttgtagtgatggtgaacctgggtgggccacttgtgggttaaagagaaggtttggaaaaaggccctcatccctgaactctatagtgagggaacaaatacaatcttgccaaattaagggactataggtttggaacaatgacaggagtgagcatatgctttgttttcttgagatagtgtgatggaagggagcattccctcaggctagatttaagtgtttatttttatattagttagctatgtgactagctaagtcagttgctctttctaagccttgatggtctcatctgtaaaatgagaacaatattaaccttgtgaaccccgctctgattgctcagaactcttttttttttctcctgggttctttgcatttcagtatttttagcaactatatagctaaattatgaaattgttacacatgttcctatacagaatgcagaaatactagaaacttattactgaaacttacttactactagcatcagaaagacaccagctaccatgaaccaaagagaagttcctgttaccttttttggtgacagatttgatccccaacccatttcgagttggatattcactttttattttggttgtaaaatgattaaattctctccttatctatgaaatagtagttaattgttccatcattaattaatgtttttttttctagttrtataagtttggagagacagtttctattgttttttggacagacacttggagaccagaaagcttctttgacaaagtgaagaagaacagacaaaatggcatgcacacattatgtttactaggtaagggttttggaatttccttgaagtaacaatatggaactatcatactgttctcattttgattttgtgttaaggtctgtggataattagctagaggtaagaaaagacacagtctagccattctatgcagaccacactctttcccatgctcttagagagacacrcatcttctgcttcaagtaccacatggctatttctgcatacacaccatagttacactgctccctcttatgccctgccctagtagatcctctccagtattccatatcttactcatttgtccatcaaggatttactgcaatccaatagacatgcactgagcaagccttaccaaggaccatcctgcatcttcctagggaggttctttgaatactgcagtattgatgctatcagattcacaatgatagatctgaaagagactctggagatcatcttattgaggcctgttttacagatgaagttgaggcccagaatattgaattatttccccaatgtcacctagtcaattgttggcagaactggtagaatcagatagccttttaataatagctcatttcactgtaccttcttccccaaatcctatttcctttttagtgtggaaagagctgggatcactgtctttgttttccaagataatagtactgagtttcagaaagccatggtgttttctttctagcagaggcactgaaattttaccgattcacatttgctaatcagcccctattctagtagcatatgttgtagaaagaaatactggtatcaaagacttaatctgtgactaaacagaacacagctaactgacatttttgatgactttgcaatgatacttctacttggaatcagaagacaaaatcccagtgctactacttactagttagagagtactgtaaacattccttagccttcatatttatcaaataggaataattcctcctacttcatggagttatatagagcagtacttctcaractatttgtggtaaagaaccatggttgggttgtttaaaacatatgtttgatttttaaattttcggtcttttatgtcagtgtcaagttactataaattttgtacatattcttactcctgtagttacttcatcatttactggcaacacaaagctcacatactggcattggtcctgagatcatactttgaattgtactgtgttactgaaactgtgtgtgaagtcactcaccaaaatgtctatcacatagcacaagatcagggcagagaataagcccatgattttggcctctgtatattaaatacagatattcagaatataagacaagatttctgtttgccactttttttttttcaagacagagtctcaatctgttgcccaggctggagtgcagtggtgcagtctcggctcactgcaacctctgcctcctggattcaggcaattctcctgccttggctccctgggtagttaggactacaggttcatgccaccacgcccggctaattttttgtattttttttagtagagatggggtttcaccatgttagccagggtggtctccatctcctgacctcatgatccacccgcctcggcctcctaaagtgctgggattacaagcgtgagccactgcactcggccttttattttatttttatttttttgagacggagccttgctcttgttgcccaggctggattgcagtggcgtgatcttggctcactgcaacctccacctcccaggttcaagcgattctcctgcctcagacttccgagtaactgggattacaggtgcctgacaccacacccggctaatttttgtatttttagtaaagatggggtttcgccatattggccaaactggtctcgaactcctgaccttaagatctgcccgcctctgccccccaaagtgctgggattacaggtatgagctactgcacctggccaatttgccaaaaatttttaagctatttgcataatatagccaatctctattatttaacaatatttaattttaagcaacaaaataaattttttgtttgtttgtttgtttaagagacaaggtctcgctctgtctcccaggctggagtgcagtgtcacaatctcagcatactgcagtctcaacctcccatgcccaagtgatcctcccacctcagccttctaggtagctggaaccacaggcatacgccaccacacctagccaatttttgtatgttttgtaaagatggagtttcgccatgttgcccaggctggtctcgaatttctgggctcmagcgatccacctaccttggccccccaaagtgctgggcttagatgagtgaaccacggtgcctggctgtatgtcttaatagaaaagattataatacatttttactaatgattggcatttcttaggatagaaattaatatctacagcagggattagcaaacaagtacccatggatcacatctggcctaatgttttgtaaataaggctttattggaacatggccgtgcaccttcatttatatattatctatggctactttcatgccacaacagcagtgatgagtagctgtgacagagaccatatggtcctcaaaacctaaaatatttgctgcctgccccctttcagaagtttgctggctcctgatcttgagtgaaattttatttaatctcatgtgctgcaccctgaatcccttcagtgatgtgttataaccttacactactttcttcatagtcttaccagccatatgaattaccttattaacttgatttcttcactgcttcataagagcagagactttatcttgctcattattctcttcctaatgtctagaagtctagcacagtgtaggcactaaataaatatttatggaagttaatggaagttttatttagtctatattctcagacttggtcttatgacccattggcacagaaaatctttaactcttgctagttcagtcaattgcagccagaatacactccttttaattccttttttttttttttttaagataaggtttaccctgtcatccaggctggagtgcagtagtgcagtctcggctcactgcaacctctgcctaccaggttcaagcaattctcctgcctcagcctcctgaggctgggattacagaagtctgctaccatgcttgtttaatttttgtgtttttagtagagatggggttttgccatgttaaccaggctggtctcaaacccctggcctcaagtgatctgcccgtctcaacctcccaaagtgctgggatgatgggcttgagccactgcacccggccccccttttattcttggcatctaattaattatagatctagattaggccataaacgcttctctaacacattttctttggtcttatgccaatatttgcaatcagctagtatgatgttttcttattttagtttattgccagtgtgatttagtgcttcattcatcattaattatctttataattttgtctttgaattttccttgtaaaaagagactggtcttactttttttatagtccttactaacaaggacactgtaagacttgtgagttggtgtggactatgccatcagatatatccatcttgttatcccaaagttagatccagttaaggccagctgtgggtagaaggtcaaagtagatgacgggcgaaggataatttttaaaaggacttttgctaaagaagtagatgtatctgagggatgaaaaatggggattcattggagctcagatactagaatatatgttttataacagtactgaaaggttctaaaacagaacagggaaggaagaatctgagaggcaggctacctgataacctccccatatatccattaaaaatgacaggaaaggccgggtgcggtggctcacgcctgtaatcccagcactttgggaggctgaggcgggtggatcacgaggtcagaagatcgagaccatcttgactaacacggtgaaaccccatctctactaaaaatacaaaaaattagccgggcgtggtggcaggtgcctgtaatctcagctactcgggaggctgagacaagagaatggtgtgaacccaggaggcggagcttgcattgagctgagattgcaccactgcactccagcctggaccacagagcgagactccttctcaaaagcaaaaaaaaaaagataggaaggagaggaagcagcacttatcttttcagaagctttggaaaggcagatagaagatcagtgtacaggtatttattgagtgcttaccctatgccccatgtagagttagtttcttttggaatactaaggaagtgtagacgtgggtcctgctctcaaagctttgaaatctagtttggaactaatgtgttgtgcacgtgaaagtttaaagaacaaaaattctattgtatggagaggcaggaaggacaaactagaaatgtggctcttgagttgtccttctaagagctgccccttttcttagctttcctgggaaaagacaaacaaggttaaacaatgtatcttccttgctccattaacaaaagcaggaaggaacagagtgtgaagtataggatgtcatgatttcaaatcctcaaaccatagttctcatcgttttatcatctggcattctcattatttaaattagtatgtatttattcaatgcctgctgtgggttaagttccatagggattagtgaggataaaccatggcaggaaaacacagagaatttaaaatttacttagaaagacaagaccaatatatatgatataattagaggttaataaaagatagcattaattgtgtagatctttccaagaacaaaaagcatttgaggagaagtcaacaaagactttatgaaggagttaggacttacgttgcccagagagtggatagtttaatatgggctggtgactgagtggtaggagagtcacttgagtaaatttattcagtagacatttatggagtgtcttctgggtacttcacattatgctaggtcctggtactaagatgaatcagagaaccttacattctagcaagtagaaatagagaggaataattatggactgtgtgaagacaagggaaaagtaatgcggggtctggcttgagacgaagtcacgaatgcactccttgattaaaaaggatttgcgtctaaaaattctcctcaaccctcttccttttaaaaatcagattctatagagcatatttgaaaagtaaagacaactgaaaatatgaaaaatctcatcacaacatttcagaagctcagagtgaatgaattaataaacgggttaaaatttttaaaatcttagaaacgtaatttaaaggaaatctgaaagttgactaacaccattgattatagggaggccacattcttaataacaggcattcgtttttttctccataatgtgacagacaagtagaaatattaaataaataatgatatttcaaacctgaaaaaggctttcaatgctggttccaagaacatttaaaaatatgtatttaatattaactctgctataatttccaagcaaactctttgatatcctttataagaaacacttctataatcacttaggaaatctgcataagtctattaaagactcctcagttgcactatgtttatttttgcaaaaacaaactttggctgaaccatttgttttcagcatgtaaagcaggaagcagctgttgctgttgctgttgtatactgagttcctttgaggatgtagagtgattctgcttttttaccttttaccaaatagttcagttgagcatgagtgattaaaaagtataccgaatcaaatattygtgatgcttggactgtcaagcttctagagagcagagtttatatctggtcaggtccctgtggtatcccagtctctgacgcagcgtctgacacacagtccatgctcaaatccctgttaaaagcatgaatacttagaattaaagtatttattcaaaattatggcatgtgttaacattcgtcagaaagcaaaagacttttttaaatgtggaaaagatttttttctacttacattacatctatcaaagggctttcagatgggtctgtgcagttactagctggtagaaatgaaaacaaagattgtgattagctgttagtagtgtatatgccaatgtttatctaattctttcccttgtcttcttttccaaaaggaaattagatgttagcaggatggtctcagggccaagttcatgtttgttttctaactagtggcacaaccacaagcttccattcttctctatgttactgtaagaaagtggctaattaaaatgtgagggaagagtgtttccccaaaatttaggtgactcttaactgaggtttacacatagggttttggataaagcttttaattaaattaaaagaactatttttacttcctacagacatcaaagtaaaggagcagtctttggaaaatctaatcaagtaagttattattctgagaatgcatacatgtgttttatttccttgaacaattcaatacattctacttaaatgacctgagttctaaagatggttgaaaatgagctctcattaacagtgtgaacattaagcatttttattcttacgaaatgataagcagtataatagagtagaaatagcaatatattttgtggattcaacactgagaacagtggttggcatctaacagacactcagtgtttgtggaatgaattaatgcgttgggattctgaaaacatgggtgtgaggccgggtgcggttgttcatgcctgtagtcccagcactttgggaggctgaggcaggtggattgtttgaggccaggagttcaaaaccagcctggccaacatggtgaaaccacgtctctactaaaaatggaaaaattagctgggtgtggtggcacgtgcctttaatctcagctacttgggaggttgaggcacgagaatcgcttgaatctgggaggcagaggttgcagtgagctgagatcacgccactgcactccagcctgggtaacagagtgagaaaaaaaaaaaaaaggcatgggtttgagtcctgagtctgcctctagttgagtgctcttgggcaagttacttccatctctgagccttattttcttcagatgtataatgatagtactaatccttttttacttagagaggcagtgtctaatacagtaccccctacccacttgtgactaaggagcatttgaaatgtggctaatgtgactgaggaactgaatttttcatttaattttaattaattaaaaaatgatactctgttattggaaaacttttaagtatgtttggaacagctttagtatataaatcaactgttaaaaccataaattttatgaaagttaaatacagatcaactatttccaatgaaaatttaatatccaaattaaggtgtgctgtaagaacatatcagatttcaaagacttaatataaaaacaatctctttaataatttttatatgagtaggtgttaaattacaacattttggattaawtaaaatattaaaatttttgccttttttggctgggcgtggtggctcatgcctgtaatcccagtactttgggaggccgaggcaggtggatcacgaggtcagcagttcgagaccagcctggccaagatggtgaaaccccgtctgtactaaaaatacaaaaaaaattagccaggcatggtggcaggcacctgtaatcccagctactcgggaggctgaggcagagaattgcttgaacccaggaggcagaggttgcagtgaaccaatatcacgccactgtactgcagcctgggcaacagagtgagactgtcttaaaaaaaaaaattgcctttttacaaacttttttgttaatatggctactagaaaacttgattctatatatggcttcatttatatttctattggatagcactgacagaatttttttgagagtcagtaaaataatctatttgaactgtgttgtaagccacaatagctatatatatatatatatatatatatatatatatatatatttatattttcgacagagtcttgctctgtcgcccaggctggagtgcagtggtgtcatctcagctcgctgcaacctccgtctcccgggttcaattgattctcctgtctcagtcttctgagtagctgggattacaggcgtgcgccaccaagccacgctaattttttttatttttagtagagacggagtttcaccatgttggtcaggctggtctcaaactcctgactttgtgatccacccgcctctgcctcccaaagtgctgggattacaggcatgagccaccacgcctggcctgcaatggctatatttttgttaatatgatagttcggcaagcctgataggcttttgaggcatacagaaataaacgtatgccatcacctgagatttttaagcatccaagatgctttagtttacttttcttagaggaaacagtgaaaagaatatgtggtttaaaaatggtcataaaaaggacactaaataacctgattaagctagagtatagaccaaattgccacttactttgaattgtttttaccaaaggtatcactttgaataaagataactttcatttagacatctatctttatgtgttcctgccatcatttcagtgagatcagaggaaagttaaattagaacaatgaaaaagcttaagaaatgaacaatcatcatgcttttgtgtatgcttaaagtgagtacatgtaaaaaaacatcaaacagaatgtagactgtggtacttgagtatacctgggagagctaattgcattaataacatattatgtagtttcawggctaagaacagtggcatctagttttctgcctataggggaaggaagatctatgaacctccacggtatatgagtgtaaaccaagcagcccagcagcttctggagattgttcaaaatcaaagaatacgaggagaagaaccaggtactcaagacactagaagggctctcatattattcctctgttactacatttagatgtgtatatgacttaatatctcataccactatggaagcaagagtcagtatttttgtattgtactatttcttgtcatttttgtccaactttaacttaaatcccataggcttcaagttgtagtgaaagaaaaaaaaattggcattcttttatagtataattaacaccattccagaaagtgaggatttttcacaaattaaacataagtcacatttgatataaatatattactgtataaatatttttgtaaaatatatctattatgttatccctaatcartggtgagatctatcctgcaaaaatatacttatcgttcttttattctccctcctttcattcttaatattgagactaggaatagttttcttcagggtaaatataagagaaaatttgttcttatattcctaatatgtagacacagtgtgtggtatataatagaaatgtttattgtcaataaatctttatgggaggttcttttttttttttttgagagagggtctcactttgtcacgcaggctggagtgcagaggcactatctcagctcattgcagcctccacctcctgggctcaagtgatcctcccaccttagctgaactacaagtgcatgccaccatgcccagctaatttctttgtgtgtttttggtagagacagggtttcaccatgttgcccaggcttttctcgaattccttggctcaagcaatcctcccacctcagcctcccaaagcctcccaaagtgttgggattacaggtgtgaaccaccacgcctggcccactgtgagactttttttttttttttgagatggggtcttgctttgttgcccaagttagagtgcagtggtgcaatcatggctcactgcaacctctgcctcccgggctcaagccaccctctcaccttagccacttgagtagctgggactacaggtgcatgccaccacacccagctaatttttttgtatttttggtggagatggggtttcaccatgttgcccagctggtctcaaactcctgagctcaagcgatccgcctgcctcagcctcccaaaatgctgggattacaggtgcgagtcaccgcacccagtcaagagattcttgagtgattgttgcttattttattctcattrgtaggccatgttaaagtcgtgaaacaaatagtctgcaaggatgttctatatccataactttgtacagaagtttcctgcattcctgtttgtccttggataaaccatttgcccccttttgatcattgttcaatcaagacccctttcccaactaaacaatacaaccattaaagggtcagctctttagctgtagcaccagagtgaataatactaaagctaaggctggctgtttttaactgaaaaacataaatagtgccaaatgctcattatttgttaaggaatctatagtctactagtctcatatctactatcttagctctcattaccatgatttaaaagagggagtattacattttaaaaaatgagaaaactgaagtttatcacacagctaattggatggcaaggcagaaactcaaatctgtgaatttatttcataatctcatggtttcttcagtatatctaggtcaatatgaacattatctcaagcaagttattaaaaacctgtgtgtaataaacattgtttactcagaacttatttaaaaacgaatgctgtgcaattgtagagtgtaagtatagcttgtcaagtcctaaaagcttagtgtaagcctttgtaattctgaaagggtaaagtttggaagtactcttttatattaggtaatacaaatgatttagaaaatcccttggatgaattaatggataactggtccataagtggcaaaagagatttaagatatttggggcttcttgaaatgtacttgtggtactaatgtttgtttgactgttggatggatgatgcatttgctgaattgaatagcagtatcttttttttttaatagcagttaccgaggagacactttgtgttggcttagccagggttggagccgacgaccagaaaattgcagcaggcactttaaggcaaatgtgcactgtggacttgggagaaccattgcattccttgatcatcacaggaggcagcatacatccaatggagatggagatgctaagtctgttttccataccagaaaatagctcagaatctcaaagcatcaatggactttgaacatagatatttaccattgtctgatgtaaatttcagccatatatggattgatatggtttggatgtatccccacccaagtctcatcttgaattttaatcctcataattcccaggtgttgtggtaggtaattgaatcatgggggcagtttccctcatgctattctcatgatagtgagctttcatgagatctgatggttttataagtgcctggcatttcccctactggctctcattctcactcttgccgccctgtgaagaggtgccttccaccgtgattgttaagtttcctgaggccttcccagccatgtggaactgtgagtcgaaaattaaacctcttttataattacccagtctcgggtatttcttcatagcagtgtgagaatggattaatacctggatgcatgcatgtttgtgtaacaaacaggtcttttggcttatctagtaagtataaaacaagtgaccaaaaagaagttgactcaacaatgcttggtttcttgtggcagtgagttttttccctatgatatcatcagttgttgctgctattttggcaaattttcaggatgtacacataaagcagaccaggctggaaagcttgtggatagacatccactgacagaatcatttaagagcagtttttatttatgaaaccaatttatacaaggtggttgttaacagaatataacttagaggtaactggaatttgaatcacttgaatctgttttaaagggtaaaaaatgttatgagtgccaagaaaagcaaataaaagattagtaaatgttcacaaaatatgtttataattttcttctttttaaaaaagttagctgtccctactgcatgaggagttgtcctgacagcagctggtattagtgtatataaacaaaggtagaaagattacatttccatccagcagtctgacttaaagctcagctgagcacatgccacaaaatgacattcttctgaattcactgtcttggttagctgacatcctaattacgtggctcatactctgctgtattttggaggttataagattgtttaattataaatgttcagccagccttgtacagttgctgtttggttttaaatagcatctttcacatccaagcagacaaatggaaaacttgctgactacaaaataaaatttttaaaaatgtaagttttaaggcaacaatggattagtcaagatatgccatataacttaattcagttaatatgccattgtatatgtgcgagtagtcacactcttcttactagtattaaataacactccatttattatatttcatttcaaagagtttcagttctgaatagaaatagctttcttatatcctagttcagttggttcaactctaagtatttccatggcctaaccaatttttctgagctctttacttagtaaattcattgaaatttgaacagatttccctattccctgggatcatcaattagctaaagattatttgacttattttacttcatttgagataagaaatatttatatatatatgaaacatctcttttttctttattattttttatttatttatttatttatttttgagacacagtctcactctgtagcccaggctagagtgtagtggtgcaatcttggctcactgcaacctctgcctcccaggttcaagcgattatcctgcctcagcctcccgagtagctgggattacagtcatgtggcggcaccacacctggctattttgtgtgtgtgtgtgtagagatggggtttcgccatgttggccaggctggtcttgaactcctgacctcaagtgatccacccaccttggcctcccaaagtgctgggattacaggcatgagccactatgcctggcctcattttcaatctgttagacacagaaggggagagagccaagtacatttaaataccagttgtatattattttcttctcatatgttaaactaaacatttaagaactatataatgaaggacttctggttttggtaatggtgtaatagcttgtaatgtacaaaccctcccaattataaactgtggacaaaatataataaacaatggtctaaaaactctagggagtcactgaaaccagctgtgaactatatatggtttttccccttcggtctttcccagactgtgtggtaaggcgtggctagaactcaagagaaagttgcaatcttactggcttgaggtgttaggatggaattaaaggccgctagaagaactgaaaattaaagcagcagatcctagaaatgaaggtgtcagaaatggaggaggcttcctgtctgcatatgatctctccttaaatccttagctaactctcgaaccgtgcatgccccgggaagactccaaggaccttggtggaaagccacagttggaaggctcaagaagctgaacagagacggctgttttctattgcaatagaagacacagtttcaagtttgaattctgacaagttagaagggcttgatagaaccttgagcttcccaaaccccagaatggccatgtattagtaaaggctgtgcacaagactaaagatttatgctaaaactaaggatgaaacctttaacataatataaaatcaaggtgattagccaatactttaaatgagatcaaagcttagcactcttcagagtatgataaaatgaatctgtataacatataaacaatgactggaatacaataaaatgctatagggtatccagagaaataaggaaatacagtttatagcttatggtttaaaaaaaaaaaaaagagcagacaacagaaaaaaaaatccgaacataaactagatgatggtggaattggcagacaaggatttttaaagcagtttttagaactatgttcatggacaaaaaggtagggtggttgtaatgaatgaatatagatatatattctcacccaaaatgtggtaacattaaaagaaaatggttgggtttaaccgtagcatagagatgacacatgaaagaaattgtccaatctgaggaaaagagaagaaaagattagaaggaagacaacagaaagcctcaatgccatttggggaaatatcaagctatttaacatatgtaactggatttccagaagaatagaaggaaaatagggcagaagaaaatataagtaacttacaggccagaattacctcaaatttggtaaagctatcaactcacagatccaataaactgagtgaaccccaagtggaataaataaagaaaatcataactaacgtaacaggtaaaactgatgaaaaccaaggataaaagaaaaaagctaccaagggtggtagtagggaacctaccaaatttttatttgaaattaaacttaaccaggttcctctgtctgctaaatctggcaattctgttctgtatgtaacttaacctcaatttaaatgaaattgtaaaatgaacactgcactactcagcagggaaaggatgaacaatagtgttttcagtctgttctctgaaatccaatgttagttaaaatagaaatacctgaaggctgcatacatttgattatttaatagtgtttagctctttaatactataaagttctttaaaattatcatgtagtgaaacactattccataatctagatacagaacggtttcatcacccacaagatctcccactgtccctttatattcatccctctagttcattcctctttattgctaagtagtgttctctcatatggatagactacagtttatccattcactatttgagagataattggtttgtttccactttttagcgattgtgtataaagttgttaaaacattaacataacaggtttttgcctgatattttatccagagggattgctggatcacatggttaagtgtgcacctaattttataagaaactgccaaaatgatttccaaagtgcctgtacattttgcattctcaccagcattgtatgggttcccattgctctgtatctttgccaccacttcatgttggcagtattttgaactattctgataggtgtgtagtggtgtctttttttttttttttagacaagagttttgcttttgttgcccaagcaggagtgcaatggcacaatctcggctcaccacaacctctgcctcctgggttcaagctattctcatgtctcagcctcccgagtagctgggattacaggcatgcaccaccacgcccagccaattttgtatttttagaagaggcggggtttctccgtgttggtcaggctggtcccgaactcccaacctcaggtgatctgcctgccttggcctcccaaagtgctgggattacaggcatgagccactgtgcctggccgcagtggtgtctttgttgtggttttaatttgtatttcccaatacctaatgatgtggatcatcttttcatgtgcttattcaccattcttatatcctatttgatgaagcatcagttcatgtcttttgcctacttttaaattggattgtttccatatggtgaaattttgagtgtttattacatattctggataaaaccttttgtaagatatatgacctgcaaatattttcttcccatttgtagcttgtcctttcattcccttaaccatttttgataaagcaaacgttttaaattttgattaaatccagtttatgttttcttacatagattatgcttctgttgccatgtctaagatcccatcacaaattcaacagactcaatatttgtatgaagtgagttttagatccacactcatttttttttttcatgtaaatgtttagttacaacatcttgataagaagactgttcttccattgaattgtttctgcaccattgtaaaaatcattaagccctatttatgtaggtttctttctgaactcttgctgttctattgatctgtgcatctctcccttctatgatactatgctgtcttaattactttagctttatggtaagtcttaaaaacaggtggtgtggttcctttaacattcttttttcaaagttgttttagctattctagttcctttgcctttccatataaacgttagaatgagcttgttgacatatacaaaagaggttgtgagatttggattggaattgtttgagatggtgtggatattttggggtttattctgttttgggtttgcccagcttcttgactctaggtgtacatcaccaaacttgggaagtttacagccattatttcttcagatcttccttcagcactatatactttatcctctccttgagaaattctgataaatacaaatgttagacatttcttactgtccaacaggttcccgagctttgttcattgttgttgttatttcagtctgttttctctgttgcctagagctgataatttttatccatctatgaattcattgactcttttctctgtcttctccattctgctgttaagtccatctgtatgtttttaaaattttggttactggtctaaaatttccatttggttctttttatgtcttctgttttttattttaacatttgtttcaagattatttgtgatttctttgtcatgtatttttctgtaggtgtttgagcatttcatatagcatttttgtattgctcgcttgagcattttaaatatctgctttaaggtctttgttagataattctaagattgatatctcagctttaccatctattgattttctgtaagttgaaattttttgcagcactttatcaagtaattttggattatagcttggacattttgaatattatgttgtgagttgctgggtcttgttcagatttaatggagaatatcaatctttttgtttgagcaggcaaccaacctgttagcttcaggatgcaattatcagattgctctttatgggccacagttccagtgtaagttcggttttcaaagactgcagttctctttggatctatttcaagtttgtggcacacaatttgggacttacgaagtcgtctgttggatagtttagttctcaagattctcaaggctaaatagaatcagatccaagcattagtgatttgaggatgatccttggggttcataaacaactttatgagattgctttcgtggtttcctcccactccataatctctccacttcctggttccctgggctccccttcttggttgagcctctggccagaaaattgggcatctagttactctactctgatactatttcatactttcatggctgggcctgcattctgctccatgtggtgggggtacagagagaaaaaagcaacagggttgctgtacccttttaaaaccataactctaccaaacagaaatattcccctcccccaaagttttagttcctatgggcttacatagctgttggccaccaccataggattgcctggccaaagcttttggaagccagtgggaagtcttccctccaactaatgtaactacaaatgtagtaactttgccttcttctgaggtctgtagaaaccaatatgacctgtgtacaaattattgctcacggggaaagtagtatgatgcacatacaggacaataaaccctgtaaatctgaacattatgatctaacttattgtctagggtggaagacagcgacggctaatcagatggaccttattttatttgtaattttacaagtcacaatgacatactcaaaagtccaagccaaatggccaagccaagccttaattgctatctaagtgctcctgcttatatgtgaatctgaatatcttgtttacttaaaaaataccacatttaaacaatgccatttggtggctacattcaggaaataatttttataaggtctttgtattattttgctttattctttagttttagcagttgctctttcacaaaaagagtactattc

SEQ ID NO: 95582 - DNA, 179913 bp, Homo sapiens
  misc_feature (1)...(179913): n = A,T,C or G
ctttgggaggtcgaggcaggagaaactggctctagcccagaacctcaagaccagcctgggcatcatagtgggaccctgtctctacaaaaaattaaacaattagccaaatgcagtggctcatgtctgtagtctcagctactctggagcctgagatgggggaatcattcaagcttaggaggttgaggttgcagtgacctgtgatagtgtcactacactccagcttgggtgacacagcgagactctgtctcaaaaaaaaaaaaaaaaaagtagtaatgacaaataaatatagatggataaattctgtaaaatttaaaaaatgtattgagttgttaacttgtttgttaagtatagcaaactggacaataaattgactactctgaagtatattgacctcatggaactttcttttaccttctaaaactgcaccattctttattgactgcattagtcaagaaggagatgaatattgaattgacttgttttacttaatgttcactataccagtatttcttaaactgtattttgtagaatgctggtataccattccattaataaatcacagggttagaaacaattgaaatttttatagaagccacacaaaaacaatagcaatggcagataatgcaacatcttatattgtttcattcggagattatttcaatatttcctctaaatatcttgaagaaaatagttctagatattatgcatacattattattgacactttatggctaatgtgtaataatctataagttaaacaatgtaatttaagctcactagggaaaaattaagaaaaggttgttgatactacagcaaataatgaatactggtcttatttccaccagctatgtgagtttgggaaatcagttacctccttctctttttttctcttttattttgccatataaccttttataaaggaactattgtgtagaagccttgagtgctcatccactgccttccactcctacccccatattgggcctgtgctaaatcccttgagtttgatggagtctgtttgaaaactggaactagctgatctcccaggtcccttctggtttttacttctttgattctggtttggaattcttaaacaggcattggtgatttgtctgatacagaatgtggctgggttaggctaaggtcttatcatttgcgggcagacttctggaacagaaccgtttatgagtcatgctatctatttttggtattctggttctactgtaataacttttttattacatgtattttactaaaagctgcttaaaattatttttgggatcaaaaattgtcaaaatatgtatatgaataaataattcaaattaccttgaatttcaaattactcagtggcacaggtttttactacgtttcatacttaatctgaaaattaatttacagaaagaattcaaagtatgtattctatattttctttacgttctttggtaactttgtatcactactgaacaaacaactaaaagagtatgttctaatgatacattctaataagaaatgatgataattttaaaataatacaatatgtaaaccacacagctgtcaggcctttgacaatcttgagctcatttttccttgccctcttccagcaagaaagaatattttccgccaggtgcagtggttcatgcctgtaatcccagcactttgggagggcgaggtgggcggatcacgaggtcaagagatcgagaccatcctggccaatatggcaaaaccccgtctctactaaaaatacaaaaattagttgggcatggtggtgcacgcctgtagtcccagctacttgggaggctgaggcaggcaaattgcttgaacccgggaggcagaggttgcagtgagccaagattgtgccactgcactccagcctgggcaacagagcaagactccatttcaaaaaaaaaaaaaaaaaaaagaatattttccttttcttgaagctaaatgataaaatttaattcttttgtttttcatttcttttgctcacatctgaatcttccatccattcttttttctttcagaactgcttacaccagtttaaatgataaaatttaattcttttatgtttttcatttcttttgctctcatctgaatcttccatccattcttttttctttttttagaactggccacaccagtttatcactagtctgcatccagttctgggacccacttagtaagcaattggacaaatgggcagagactggactggaaagtgaggggcttgaagccatgtaatataagacaatgtagaagaaaatggagatatttatctggggaagactaaggagaaatggaaggtgttcaaggaaactgcctttgcatttttgaagagctgtcatgagtaagggtgatcataggtcctgcagcctccaggcagaattagaactagtggcttttgacataatttagagctgcctccagcagtgagttttctagaactgcaggtgcacaagcacgggttgcagggtagttgaagcagttttcaagcaatggttgaggagttagatttaaattttgtcattttcagggcgagtgcagtggctcatatctgtaattccagcactttgggatcctgaggcgggcggattacttgaggtcagcagtttgagaccagcctggccaacatagtgaaatcctgtctctaccaaaaatatgaaaattaaccggcgtggtggcgcacatgcctgtagtcccagctactctggaggctgtggcagtagaatcgcttgaacccgggaggtggaggttgcaatgagcccagatggtgccactgcactccagcctgggctacagagcaagactccgtctagagaaaaaaaaaaaaggcgttgttttcaaactcgacactttttacacttacctgctgaatttctgtgtgtaatattaccttccttttgtgcagttgagcgatatgtaaactctcttagtatttcctttatatgtgaaacgcctttattgtttcttaaaagtccattccttaagtttatatcaagtttcgtggttggaaaattttcttccattatcttcccttgtagactgtaaaagtatgcctttattatgaaactacaaccaacaggaactttgacctcaggataactgagagaataaagtgtttttatgatctcattagaaccttggtatgtattatacgtgtgctgtgtgtgcattatctagttcatatttttcttgtagaattttctataccatttagaatggcttagagagatttgattatactgacacttccttccatgcaattttgttgttgtttgtttgagacagggtctcactctgtcacccagagacactgcactgctggagtgcagtggcataatcacgtaatcacagctcactgaaacctctgcctcccggttcaagccattctcccgcctcggcctcatgagtagctgggattgcaggtgcccgccaccacatctggctaatttttttttgagacggggtctttctctgtcgcccaggctggagtgccgtggcactatctcggctcactgcaacctcccgagtagctgggattacaggcgtgtgccaccacacccggctaagttttgtatttttttttttttgaaacatagttttgctcgtcacccaggctgtagcacaatgatgcgatcttggctcactgcaacctccgcctcccaggttcaagccattcttctgcctcagcctccctagtagctgggattacaggtgtgtgccaccattcctggctaatttttttgtattattagtagagttgggggtttcaccatgttggccaggctggtctcgaactcctgccctcaggtgatccacctgcctcggcctccccaagtgctgggattacaggcatgagccaccgcgcccagacaagttttgtatttttttaagtagaggcaaggtttcgccatgttggccaggatggtcttgaactcctgacctcaggtgatccgcaggccttggcctcccaaagtgctgtaattacaggtgtgagccaccatgaccagccccatgcaatattttaaaaaacattaattacttacagagttttattatctttgtaaaaatgctaaggaaaaataaacattttcatttgaatttaaggacttgtatttgttaggtcataattcattcctcatgatcacaattttaagcaggagagttatataaaagatttttgtaaattcattttggaaaataacaagaaggtgttcaactatatctggcttctctgaaagtgtagattggagttcattagactatttactttgtgcaattaaaagtttatgaactgaatgagaactctgacttctatttctaacgcactttttaatgaaaaattgttggggaatttgaatttagattatgcaagaattttaaatcagcatcttcggaaatacaacaacatctttggatttatttagccttttaaacaaagtgggcaagtttatcgagagattcatatactttgtttttccctatctttcatataagaaatactagattttttttcaataaaataatttgaggcctggcgcggtggctcagcctgtaatcccagcgctgtggcaggccaaggcagggcggattgcttgtgctcaggaactggagacgagcctggccaacatggcaaaacccggtctctacaaaaaatacaaaaattagccgggtgtggtggcgcacgcctgtagatccaactatttgggagaatgaggcacgagaatcgcttgtactcgggaggtggagattgcagtgagcagagattgagccaccgcactccggcctgggtgacagagcgagaccctgtctaaaacaaaacacacattaaaaaaaaaaaaaccacaaacaaaacctgcaattggccctcgaagggctggttccctcagtcagctctgcacgggtgcgccccctttctccctagaggtcaacaagcgactgcgaaggaaaacgccgccacaagtttcttgctgtttctggagagacctctcagagcgcatgctcttcggatagtcggtctgtagcgccattttcgtatggaagggactgcactctgattaggtacagccttaggacgcccagcgttcaagttgttcaaacagtacgtagagcctcgcagagacaagtcaatggcctcttttagcgggactcctgcctggagcgcttcagctgagactatgtaaagaaattcctttgtgttaaccttcctccttggaccagtggactctcctctctctcctgttccctccgcgcccgcccaggctggctcagcggtctcgccccgcccctccgggaccggagcactgtaaagattaggcatctgtgatgcttttgcgctcacattggcggcccagatgagagggcgtggagaaccagatgggaaactttttgtcccgtgagaacaaagtacaagttatatcagagtctggtatgtgtagaggaaaccaatacatgtactgtgagctaggagctggtgcttctttttcaattgtattttttataaagatgcagaccccctcagtgttgggcgtggggggtggctgaaatgttagctagaggcgaggcagggcacggagatctgaggtttttacgagtgtgtgtgtgtgtgtgtgtgtgtgtgtgtgcgcgcgcgcgcgccctacaagagtttagaagagcatgggtgagtgggcgagaaagaaagagaatgagagagagagagaaaagaaatctggagtgggacaagacttagagggtgcagaaaagaaagggggcgccagcacatcctagcctccgaggccgcgacagcgcctttggcgatgtccactctcaaccccgccgtttcattcataagtttctggcctacaggccccgcccgctcccctgggccgagggccccgtttcctgaacagcaattggtggacggcaacaaagccttagcaaccggctcctagtgacccgcggggcgcctggtaactggggctgctgcggagaaaggagcggggctgtccctttaagggatggccgcggagtcgtgaaagtggagggggctgagggagggcggggaggaaggtctgggggcggacccagggggaggaggaggaggaagagtaactgctgaaaggaggtggcgaaggaggatccggagcagctgctgccagcccgcgggcactgaagtcctcccggctgccgctcgagtagccacgggcgcgatcgggaccagaagtctcctcctccatgatcactttggaagccgggggaasactttgccctgccctgagagctggtctgcgtttcccaggcgcggcggcggcggagcagcagctgcagcagccgagtccaaataggagcggccacagccaggggcgtgwgcgccccgcgcggagcgagctcgggttcccctcggaatgtccccggggcgcccggcgcgctgaccccgaagccgcctccgccttcggcgcctgctgcctccctcggccaggcttgttgttcgggactgtgagcttcctggctcctgggcagtggggaagcccccgggggcgagtgacytcagctggccacgacccagccctcccccgtgcgtatctcgcttaagatggcagcggagtcaggggaactaatcggggcttgtgagttcatgaaaggtgaggagcagccgccccgcatcttccaacgctttcttgcccccaactcttcacttcccgcgccactgtccccaccttctcctgaggctgccagtgtcctgcagccgctgcgcgcgctctcgtcccctctagggrctctcctttctccgaggaccccctgcttccggcktctctttcttgtgtcccttgctccctctgcagctccctcggatggcctctcggcctcgtaatgggacagcaccggcttctgcccgtactccggcactcagcagctcatggggagcctgctccggatgctcaccggtcacctttactccaccatcgcaggcttcggttttcgggacacccccaaccacaccccccaagtctctctcccttcctctttttcaaatctccgaagctgcgtcgggaggctcacctctttcttcyccttctcgcagctgctgaggtctggagatttgggaaccaaacttgcacctccagttctgcgggtacccccagctcctgcctactctgctggcctgaaacaagggaaatgtgggtgctctgagccccgctgagttcctcggtcaggtcctcctcttgcctaactgttgtgctcttgagtctctagctttctgggagggatgaggtttctgcaagaattccacgtgttaatggggtctttaaattgtgatccttcgtatgttaccacccaccttcacttccacttcyctacttctcatatgttttttctgtcttttaaacttgtctttcagatcggttatattttgctactttaaggaatagaccaaaaagcacagtaaatacccactatttctccatcgatgaggagctggtctatgaaaagtaagtttatgttttgtttttttttctcttggccattcagcttgttctttgacgaggaaacactatgcacttttatggcagttttattcatttcccccccaatgatacgagtaacaatatcaattttttaagactcaggtgcctggggagaagttcagagaaaattgacagaatttgaacctttcaacacttcagttcttttagacatctatctgttttagttcttcctaccaccacaacaaacagcaactggagattcctaacattccccagagtaggaccagggagacacactgtcattgccagactcagtaattggcctgtgaatcagtcactaagtatttatggagtggccatagggtacagggcagtgcatgtattacaggtgcttgagctttatagtttacaagacttctgttctatctcaggatgtttttgtttgtgcagctctttttcagaaagtgggacacattaactgcggggagctgtatcagagtcacatttatgactaacattttatctgacatattattgattcttttatttgggtaccccaaactttttgatattattttctttgcttctaaggaaatgatatagcagtgctgatttattttctttgattactttgcttctgtgggattaggatttgagagtgtaaaataaaagtagggaactgttttctgtgaaagaccactgatctacaggaaaaagatatcttaatacttcaggcatagtaaaacattaattgaagagagataaatctttattcagtaaaagtatcagataataagaaataagaaggctgaattgacttggttatgtacttttatgaaaagagctggtgtttcagaggagtctaatatattctattttaaacgtttaaattacttgttatctttaccaaatgtgcagataaatgaacatagttaaattaatcataattagcttccttggacttgtcttgttagaaaggttattggcagttctgcctaaggatttgtgggtactaccaggtcttcgaagagtaagtgttctggaccttcaagagcatatcttttatttgggggaaaacaatctttgtcacttcatcatagaggttcttgaaactgaggtctgcgacatttctcttagtggtgctgggaggagaatgcttcttgaatggctaaagtaagagtgggaatgaaagagccctttgctgctgctcatgaatgcccagagttgctgaggcaaagaggtctgagtccctggtgtcagattacagctctgcttctagacaggatggagttatgtgcggctgtgtacctggatgatgtcactgccagcagtgtttattgagtgttcactctgttgttgggaatgtgcattgttgtgcctctgtttttgtgattttaggttttgggggtctctcatgagtctgagagtggggatggtgtatatatcattatgttcaattctacagtacagtggttgttaatatgtcattgaatgagctctagccatggagatctgagtcacttctcttgggattgctaggtggtagatctagcagaaaattaagccaaactaaacactgtgcatgatggctttttgattttaatattgatagatgagggaaatttttaatgtgattttcatgttggtattttgggataggcctacaaatcatattcctcttatagtctactgtttttctggtatcttataaggaaagacttgctggagaawccatccaatttatattgtgagttgggattgacatttgaaatacgatgaggacttcagcctgggcagagtgtgtacttttcttagtttgaacttaccctactgtgccacagtaatggctgtggctctgacacctccaactccatcttttttgttaccccaacatattacatggtgctaggtgatgcagagaataaaacaatgttgaatgcatatgttaccttcaaagagctccaagcctgtagggaaaataacagaactgcagtttgaggtataggaaagatacctgcccaaagagaaatacaacctctatgctaggagaggcattcacaggcaggtaggggcacatctggtggaagsgttcagcaaaggcttcgtggaagagttaagattggcttgaaggatggacaaggtcttatcaggcagagacatgagaggagggatcttggaaaacagcaagtgtgaggaggggagaggcttgggacgtgtgttcagggaacagtaagtcctccagtttgcctggtgtgtattcagggaacatgtaggggatggagaatgtgaaattgagatgttggctggggacagaatgaatgtcagggtgagaaacctgcagtttctttggtacaccatgggactcttgagggatttggggcagccatggtatgacttgatttgtgctaattacaaacaatgggaaacatttattgagcatttaaatgtgtgccagatgctgttctaggtgctctataactattaattcattgtgttttcacaacaattctgtgagacaggcactattatccttattgtacaaaaaggcatagagaagctgggtcacttgcccaaggtcacagaagtaaaagtagcagagctggagtttgaaaccaagtcatctagttgcagaggacatatatccttctcaaaaaattaatacagtagcatcatttaagaggggttgttaaggagataagagcccacttaaaaaaattcaggggggaccaggcatagtggctcacgcctgtaatcacagcactttgggaggccgaggcaggtggatcacgaggccaggagttcaagaccagcctggccaacatgttgaaaccccgtctctactaaaaatacaaaaattagctgggcatggtggcgtgttcctataatcccagctacttgggaggctgaggcaggagaattgcttgaaccaggacctggtaggtggaggttgcagtgagctgagattgcgccactgcactctagcctgggctacagagcaagactctgtctaaaaaaaaaaaaaaaaaaaaaaaaattcaggggaaagaaacaagtacctggattaggatggtgacaatggtgatggaaagaagcgatctgaagccatgtgacctggcaacacaggagggtggcgtggaggggtgctgaggaaaaagagggatcaaagaagtccttaagacagcttaggttgtggtgagcctactggagctcttaactgaaataaggaaggagggtggaataattggctttggtgggaagatcaggcattccattttggccagattgaatttaagaaatttaagggatatttacatcactgttagatatcacatacatttgaggttcttaaatttgggaattttcccaaagaractaataaagctgtgagaatgatgcgatttctgggaagatagagaaggtctcaaggtctgtatttcacaagtagaaccaggatgggaggagcaagggaaggtggaagtacgcaacaaagaggtggacaaacactgaaggggaaaggagaaagggagaaggactgactccatctcgtcagctccactttggggaagtatagaatgagagagactgcaaagcccctagaaggatgtctagtaacccgggctctgtctggaggacgtcctacagcgagaaagattttgactatcacatcataatgtgcatgtctctgaggagaagaatatatttatattcattatcacacaggcctttgtactgygtaattatttgctgaatgtttaaattaaatgctgcttttccagctgggtgtgcttgtagtcccagctactcttgaggctgaggcgacaggattgcttgaggccygcagttgaactgaaaagccagcctgccagcctgagcaacatagtgagaccccatctcttaaaaaaaaaaaaaaaagaaagaaatgctgcttttctggctaaattatcaccttagaagcgattgtttttgaatcaggaagtagactctttaaatattaggctgtggatattctggccacagctgtgttttgcgcagatgtttctttagttatgaaaggaggacagcattccatgattgaaatgtcaaccttctgagatgctggtggagaaaatttaatgaggtggcctcatgaggtaaggctattaaaagtgaacgtttgaattatctgcttgattttttaaaacagaacttattactataaaggcctgggcagctttaataaaatgaggatgataagaaatcatcctttgtccttgggttatgatttcacaggtcagagttaaaatcaaagtataggctaacacactagtggtacaaaaatagctccacaaaaagggagcctttcaaagaagatttatctgcatttgattaagctacaaataacacaccactccctggaaaggcttgttctttggtattggaattgggccccgtaatccaaacaggcgcttacttttaataacttggcttacttttgtgtggctaaaaagttagtgaaatgaaatatattacttgttatgacatctgtgtgcccctcctagtggtggtcatgggtgtagggttggatgttcatggcatagaaagccagtttgctgggaaggatagtgtatagggtcttcattttcagcctgtccattgtcatttcttctctttttgagttgtgaagaaaggtattgaaagtgcaggaaagagctctttagggagaaactctagggactgaattttaagcagtttctgaagtgacttgaagaatttcaccaaatgttttagcatgttaagaatgagcagcctctaatgagaactaattagctaaatggaagatttaaataatttaaaacattcaattttcatttaaacttaattaaagcagcctgatattaatgcatccaggaagttttggataagtaatttatagaaaaatgatttcttttatcttgtctatagcatagttttgagtcaaaatgtgaacatagaatatttatgagagaagcatggaaaaactactcttgcctagaaatatttgtgggaatgcatatttaggttagaggtaggtcaggagaaacccttttggtttttaaatttttatttcaaattaaatgtatagcaagtaggataatttaatggaaggttgaatgccacttaagcatatacacacatacacatatatatgatctgatagagccttacggtcatcatttagaacctcaattctcattataaattgctatgatatagacagaagaggagatttggttgaacctcgagacaaatttcattgtgggaataataataaagccatagcaacaacaacagcagcagcagcagcagctaacatgtatagccctgtgccaggcagtgttctaagtggtttacacgcacacattaactcaattaatcctcagaacaagcctaggagttagatgctgttattatcactacttaacaaaggaggaagtagaggtccagagagggaagtatattgcctaaggtcactgagctggtaaggcagagcagggatgcaagccagaggcagtccaccctggagtccaggcatttcccagttggcctgagactgatgccaatggggagggtatgggacaactttgccccttcctgacagacttgatccctctaacttgggtggtgatggctcttgggggaaatgtgccactgacagtatatgcacaaactatgaccagctcctatctgggaatgtgtggtggtaatttaaacatttttctttgtaatttcacttttggggggtataattttgccttttttttcctatcagtgcactaccaaaaagaaagagaggaaagaaattgagttaattgtaggacacgtgaaaacgaaagaagcccagtttttataagcctatgataactgcttttgtaggctgtctggtgaaatgttctggctgcttacctggtgtaacttaaggtgatttttttttttaaggtattctccaaaaaaaaccctcagaaaactgtttactttctaaaagatggtagtttatagtttcttcccccctttttcttctcttcatccaaaccttggaaaagtaatattgttcagggctgctttttttcaccttcttctttttttttttttttttgagttggagtttccttctgttgccaggctggagtgcagtggtgcgatctcagctcactgtaacctccgcctcctgggttcaaccgattctcgtgcctcagcctcctgagtagctgggattacaggcgcgcaccaccacacccagctattttttttttttttttttgtatttttagtagagacgaggtttcaccatgttggccgggtggtcttgatctcctgacctcgtgatctgcctgcctcggcctcccaaagtgctaggattacaggcatgagccactgtgcctagcctttttcaccttctgttttgaacacatgacagccagtgttatgatgtagtatatgttaagaggaagtagatatatctgtgtacattcatagttagttctttttttttttttgaaacagggtcttgctctgtcacccagactggagtgcagtggggcaatctcggctcactgcaacctccacctccggggttcaagcaattctcccacctcagcctcccgaatagctgggattatgggtgcatgccaccatgccttgctaatttttgtatttttttgtagagacagggtttcaccatgttgaccaggctggtctcgaactcctggccttaagtgatctgcctgcctcggcctcccaaagtgctgggattacaggtgtgagccaccgtgcctggcccacagttcttaattctgtaatccaggggaatcaaatttaccttctagataatgatttatttaaatatctgctgttttgacctcttaggcattcggtgtagagttgatctctaatcttcataatgataaattattactctgttttttcagtttgcttgagataaggctgtgaaaacaaaaaatgtagccgaggtgctaaggagagttatcttaacagggctagtcataatcatgcagcctgagagagagctccaagtgggctgcaggagatcccagtggggagctgtcagccttccaagttctttctgtgccaggtcaccacagggcggcttcattattttgtttgaagtagattcctaagacatcagatgttctcatttgtaagttcataaacacattcccaagccagaagtaaatgacttttacttagccacagctcaatacccctttgtgcttaaaaaaaaaaaaacaacaaaaaacaaaaaacaaaaaaactaaaaactaaaacacaagcctcacaaaactcttgacacatttttatgggaagtgaaaagcataacttaaaactttcataagtggttgaaaattgctatacaagaaacttagtatttagatgggatagattttgatgcagaacactgtactaatgctttggagatatgtatttgtaaagaaggaagtagaaacacatgcagtacaggataatacatgaccaaagctgcaaatgtatgtgttaggagttcaagaaaggaagagattattgctacccagggtgataagcactgagctagtttttgaagggtgtataatagcaaagagtacattttatgatctctgtgaggaccagtactacctgtttttgctcaccattatgtcccaacacctagcacygtgcctggcatagatatggggctcaagaaattttagttgaatgaatgaatgagtgagtaagtgaatgaggaagaaaggaaagaaaaagatttcaggcagagtcctgagaaaaggcacaagaggtgtttgggaatagcaagattctgttagaggaggtgtaataatatttgaatggagaggagtcacaggtcacagcagcagtcacttagttggggactggattgtggaaaactgtttggatgtcagtaaattgtgcttgcttgtaaatggcagagagtgaccagggctctactttaggacgagtgctgccatcgctcgaaggtggggtcagttaggctatggaagaattggattagggttgcagcagtggggaaagaaaggccagatggggagaggctggaaagaattggttgactggatttgggactgagcagatgcgggtagggaggaggaagcaaaggtgaattcaaagtttctggcttgggtgactgggagagagggacacctttaagtaggtgaggtacgtaaatcagaaggaaactgcctttttgctattctgttttgttttgaggattggagataggaagtaaaaagggggtcattataatggagtctttgtcttttgtgatctttaagcggaaaatagaccgtgtctgtcctggatatttaaaatgtggggaggtaagtggcacaactgatctcaagttcctttctggctttgtgatttgagctgaattttttatactgaattgtgaaattcattgtgtcttagaaatattttttttaatttttcaaagaatattgcttttctacaatgaagaaattcaaacctacagtgctataaatttttaattggcataattttgtatatgcagttttaaatgctgatttttttaatcatacatgagcattgtaaaccaatgccatttttcaaaatcaccataaatgtctctatattaataatatttcggggaaaggatataccatactgtattgaacatttttctctctttggtcattttggttgtttcctatgtcttgtcattttaagttgttccaattcacattactgaascaaagtagagctgtgaataattctttttaaagctttagtttcaatttacttaaaaaatatattggtttgttttaatcaacgaaatacttccaggagcaccaaagaattttatgtggattgagagtcatcaaaaatattgctctatttattaaaaatatgtaacatccccagttcttgacaacttgaaaatgaagcagcattgttgcctggggtaaatacccggggttcttcatctcatcgaagattaacaataggtacacgtgagtgggttaaggagcagagactttaataggcagaagaaaggacagaggagagagtagctctccctctcttgtgagacagaggagtccaaagggaaaagcgggcctgcagctgaccgcaacaggttttatagtctggcttgaggaagcggtgtctgatttacatagggcccgcagattggttcaaccaggtgtgacgtttacgtagtgggtggggaaggctgatcaccccaccctaatcttattatgcaaatggactttccactcggccagtgccgtcttgtctgctcctcactgtacatgtggctggcaaaaagagaagatggagctgccattttgaacatgcctagtcccaggtagtagtattcctactggcacaactgccgacattcacctgtgcaagtttccagcttgcttgtttacgtgtgcagctctcttttacaggctgctgtttgttaaaagagaaaatgattttagggctgcttttcrttaaaaggaaacccttaccgagggctcccgaaccctcagtacctgcmtaagtaatttctttttaactcgtatatcaaaaacatctggtaaatgatcacaattatttgttgttgacagtgaattcctttataagaaataatttgtgtaaactataaatttgaataagatatttcctttattgttaatttaattttttggtcttaaatattttcacatcctagtgacaaattgaagaatttgccagtttagacttctctttttttttttttataaaatttaattttcttttgagaactggaaaaggtagtttatttcaaatttggtccccatgattgatgtactttagtaatgcatttattcagttttgtgtatctggatatgtggcatttcagtgagacagcttctacagagaattggaaaattacattctgaaatatcaaagttttataatttgaataatttacggaaacctttctaaaatgaatatacatttctgccttcttaaagaatttactggccaggcatagtggctcacgcttctaattccacgctttgggaggccaaggtgggcagattgctcgagcaacatgctgaaaccctgtctctacaaaaaatacaaaaattagccaggcatgttccacatggctgtagtcctagctactctggaggctgaggtgggaggatcacttgagcttaggaggtcgaggcttcagtgaaccatgagcatgccacagcactcagcctaggtggcagatcaagaccctgtcacaaaaaaaaaatttattgatcacaatttactttttttctgtcatacacagacttcatcattatggatgatcatcttttttttttttaattttttatttttgagatggagtctcgctctgttgccaggctggagtgcagtggcccgatgtcggctcactgcaacctctgcctcccaggttcaagcgattctcttgcctcagactcccaagtagctgggactacaggtgcatgccaccacacccagctaatttttgtatttttttttttaatagagacagggtttcaccatgttggccaggatggtctcaatctcttgacctcgtgatccgcccgcctcggcctcccaaagtgctgggattacaggcggagccgttgcccccggccctgtgatcctcaccacaaattttagagtaattattttccttttgagagcctcagccactttatgaaatctgagggttagccttttatgtatgggggaatcgctcatcattctgttttctaacaaagctttgcatatactgtctgtatagctctcctgccttcagtactagccattgaataatggagttaatttacactgcttgagaatatttctgtgggagtgaattttaattttcccagtgcattcctgaagaagtctccttttgttttcgttaatctgagtctctaagggagtttttattaactgaccttctctaacgagggatgttagaattacagaccctgatactggaaggtttcttgataccatctggtctgttgtttggctttaaggcaaagtgaaagcactcacttattttacagaaacagcagctgacacctgacctgaccagtatttacctcgggttaagaaggtaataagtggagaatggttcctcaccctctggtgttgtaaacctgaactttcttagaaatctagacaatgcatcaagggacaggattgatagttgatattggggttctctccttcctttatgatctcaacaaatgtcagactttttgcagacaagtaagtaataaagatgataagtttcctaatacatgtagctgctttgtagtctgtgggtttgctttctggctgtgcagaaaacagtgaatttcatggaaaaagttgtgttcttttccttcctcaaagaggagacactctgagggaaatgttttctgtacccagacccaatgcactgagaggacagacagaacagagaacatcaaatagggcaagtagaccttgagaaacatttgaacagttgaatgggtttgtccaataaggataactagagtcatagactctgtagagtctatatagcggctagaactgtgatatatgatattacataagagctggaaagaactttaggagccatctaattcagtggcttcatttgatagatgaggacgtggagtcccagagaggctacgacaccagattagggacactgagtgaccaaattgggactggaaccttttggcacccagtgatctttagttctgcatcagactgctgtgtgtgtgggaagcttgttagatgtgcagcaactcttccccaagaagttggcatcagtgtgactgtgggtggttatgctaaagggcttgagcaaaaactcagactagtgccctcatctgaggttggtatttgttatgcagttaggacctttttaaaatgtgatcattatgagttcagccataataatcacgtctcatacagaaactttatcatctgactggaggggtgcggatagtattctagtgatagggaaactgttaggtaatgtgtggcccagaggcattgctgatcaatttcaacaaaattttacacacacacacacacacacacacacacacacacacggtctcattgtgttttggaggatactgctattttagcatttatcacattgtaataatgtctttacctgtcttctcagtagatagtgagctccttgtgggtagggactggtgaccaataggcttttagtaactatttgagtgagcaagtgaatgaagagacaaaaaacgtcagcagtgctggtaaaacattgaaaggttggcatgccttataacgatcttatagaatttattcatcctgtttttaaagcagttaattttttttgtattgcaagtactctgtgatgaatatgctaactwgtaatgccttgctcagaataggtagtcataaattttgttgaatgaatgagtacttcttggaatgtagcttatctttttgctgaggtgttgggaattttcacatgaagcttctaatgtgtagaataaggtataacaatacttcaaacaatgattcctctgggaattgactcacttaaattatagtttattagaaaaaccgaagacaaaataatggtacatcataaacttcataaatctgtgagaagagctgcacatgttgagtatgacagcaaggcttttaggcccagcttctatgtcccttcaaatttgtaggacctgcacctgtggggtggtgggtgatcctacccttgtgaatgtttgctctgatccttgggctcctgtttctttgttctcctggtaaggagatgaacctccttcctcctccacttgcaggactccaaatgctccaattcttttagtttctttcctgtcaaaacagaaaagggtttgattttagctatttacacttactgaataaaaagatggatggaccgattttcccttaatagttcatgagtttcattgtaggcattgacccataatttgccaatcttcttagaagaaatctgcaaataggtggagagaatcattcgttcatttgttaattcatttggagatgaacgcacgggtactctgaaataataaaatgtccgtgtttttccctggccacatgagaccaaaagactactcccctctgccaagacaaagtggggacccgtgcttggctgtggctctggaagccttttcctaggaaatgccagagtggagaagactctgtccattgtcattaacttcaagtttaggagtgcactcagccctcagatttctgaatagtctctgaagtacttatttctaccatctcctcccttttcactatccccaggttgatgaccttccatttctcctcttccaccctgcttttgttccaagctgcccaaataaatctagcacatttgattattttcattgattatcaattaatttttattttgaatttccctctagctaatagtatgtattataagtatgttttcatttttccctcaactctggtgaagaaggttcttacaaaggagcatgttgttggaagatgtcttctttattcacagtatttcattataccaaagttggtgataacccagcatggtgtgaacaactatcagcaatttttcaatgatcttgacatttaaaaatatatttattaatagtaagctagaaaactatatgtataagactatattattttaaatacataaatagtcttacaagtgtaagtattgtatcaaatgaccttaagataagatagagcttgttggctttatatttgtgacaattctgacttttgaagacttgttcaaaattgctcttggttgtgcaaaacttttgactgaatttttttagtgtaacttgaagctcatccgtctttttgtgggatataaaggctggcccactgagcttcaacatactgtggggtgggaagtcctctgggttaggattgcttattttttttctacctttaacctgaggctcttgccaaaagagaggcataacttcttcattgttgctatctttggatagcagcctactcttaaaacagcctgtctttttgagagacagtgaaggagggtgggaactagatcctcacctatttttccattctcttatgttccaagtcccaactggctttttggaaatatgaccctcttgaacaaaacaggataaaaattaccagggcctattctcactgttgggaaataattgggcctttgtagggaaaggatattgtcttcaaacattttatctatacttcgtttatggtacttggtaatttcttttatcttttatagttattttgatatgtcttttcatcttgatcagtattgtccatcagtgcagaacattgttgaattctgtagccattagctacgtgtggcttttgaacacatttgaaataattgaagaatttttaatttgtttcaccttagttaatttaaatttaaatagccatgactagtggctaccatgttggagagtacagatcaacttaaggataatgtttgtatttgatttactttctcctgtgttattgtagtatgccaattttatttcctggtgtttggtgaaataggttcatatgtgaaccatattgctttcaaaagtacatgtggctaagccaatctgattgttagaaattgtacatctttgaatttgagtttgaagttggattgtaatggttagtatgaaactggaatttgatgacgaattcttttttaaaaaatttcaacttttattttagattcaggggtatatgtgcaggtttgtatacaagcatattttgtgatgctaaggtttggggtrtaaatgatcctgtcacccaggtagtgagcatagttcccaatagttagttttgcaaccctttactcccttcttccctccccacttcagtagtccttcatgtctattgttgccatctttttgtccgtgagtagtcaattgtgtagttcccacttataaatgagaacatgcggtatttggttttctattcctgcattaattcttttaggataatagcctccagcttcatccatgttgctgcaaagatagaacgatttattttcttttggatatatacccagtaatgggattgctgggttgaatggtagttctgttttaagtttttttgagaaatctccaaactgcttttcacagtggctggactaatttagattcccgccgccaacagtgtgaatctgttgttttttgacattttttttttttttttgagatggagtctcgctctgtcgccaggctggagtgcagtggcgcaatctcggctcactgcaacctccgcctcctgggttcaagcaattttcctgcctctgcctcctgggttcaagcgattctcctgcctcagcctccaaggtagctgtgactacaggcatgtgccaccacgcccagctaatttttgtatttttagtagagatggggtttcaccatgttggccaggatggtcttgatctcttgacctcgtgatccgcccaccttggcctcccaaagtgctggaattacaggcgtgagccactgcctagccttgactttttaatagtagccattctgactggtgtgagatggtgtctcattatggttttgattggtgtttctctgatgattagtgatgttgatcatttttcatatgttaggtgcttgtgtttcttcttttgagaagtgtctgttcatgtcttttgctcattttttaatggggttatttttctcttgttcaactgttaaattcctatggattctagatattagacctttgtcagatacatagtttgcgaatatttttccccttctgtatgttgtctgtttactctgttgatagtttattttgctgttcagaagctctttagtttaattaggtcccacttgtcaatgtttgctttttgaggacttagtcataaattctttcctgaggccgatatttagaatggtgtttcctaggttttcttctaaaaatttttttttttttttgagacacctaagttggagtgctgtggcataatcatggctaactgcagccttgaccttctgggctcaagtgatcctcctgcctcagcctcccaagtagctaggactatagatgtatgccaccacacctggctaattaaaaaaaaaawttttttttttggagacagggtctcattttgtcacccaggctggagtgtagtggcaccatcagaaatcactgcagcctcgacctcccgggctcaagcaattctcctgcctcagcctcccaagtacctgggactacaggcatgcactaccacacccagctaatttttgtaatttttaggagatggggttttgctatgttgcccaggccggtcttgaactcctgggggtcaagcgatcggcctgccttagcctctcaaagtgttgggattataggcatgagccactgcacccagcctaaagttttttttttttttgtagagatggagtctccctttgttgctcaggctagtctcaaactcctgagctcaagcaatcctcacactttggcctcccaaagtgctatttcataagcatgagccacggctcctggcctcttctgggacatttagtttgagatcttacatttaaatctttaatctatcttgagttaatttttgtatacggtgatagataggagaccagtttcattcttttgcatttggctagccagctatcccagcaccatttattgaataggaagtcctttccctagtgctatttctgttgattttgttgaagatcagatggctgtaggtgtacaggtttatttcggggttctctataatgttccattgttctatgtgtctgtttttgtaccagtaccatgctgttttggttattatagccttagagtagagttttaatttgggtaatgtgatgcctctggctttgttctttttgcttattgctttgactatttggccttattttggttccatatgaattttagaatagttttttttctaattctgtgaaaaatgatactggtagtgtaataggaatagtgttgaaactgtagattgctttgggcaatatagtgattttatccatattgtttcttccaatccatgagcatgtaatgttttttcatttgtgttgtctgtaatttcttttagcagtgttttgtagttctccttgtagagatctttcatgttggttagatgtattcctaggtattttagttcttttgaggctattgtaactgggattacatttttgatttggctcttagcttgaatattattggtgtatggaaatgctactgatttttgtacatgaattttgtatcctgaaaccttattgaagttgtttatcagttccaggagccttttggcagagtcattaggattttctaggtatatcattatatcgtcagtggaaagagatagtttgacttattttcctatttgagtgccttttattttttctttggttgcttgctctggctaggacttctagtactgtgttaaataggagtggtaagagtgggcatccttgtcttgtttcaactcctaaagggaatgcttccagcttttgttcattcagtatgatgttggttgtgggtttgtcatagatggctcttattattttggggtatgttcctttgatgcccagtttgttaaggatttttaccatgaacggatgttggattttatcagaagctttttttgtgtctttgagatgatcacattttaaaaaaatgtttaattttgttaatgtggtgtgtcacatttattggtttgcatatgctgacccaaccttgcattccaggaatgaagcctacttcatcgtgatgcataaactttttgaggtgctgctggatttggtttttggaggatttttatggataacttgaattatttttgctttcccaaaatttattcaaagtgagtttaaaaagctgaaataaccatagctaaaacttcaaattctaccagtgtcaatattcatatacaagtagaaaaaaaacaagttatattagtcaaaagtgttgcttccattaacccaaggataagaaaatctcttatttagaaaaaaggttaccttaatcaatactggtagatgcatatttatacacaggcatactgtggagatattgcaggtttggttctagaccaccacaataaagcaaatactgcaacaaagcaagtcacacaaggttttttggtttctcagtacatataaaagctatgtttatactatactgtggtctattaagtgtgtagtagcattgtgtctaagaaagcaatgtatataccttaactaaaaatactttattgctaaaaaatgctaatgatcatctgagcctttagcaagttgtaatcttcttgctggtggagggccctgccccagtgtgatggctgctgactgatcagggtggtggttgctgaaggttggggtggctgtggcaatttcttaaaataagacagcagtgaaatttgccatattgattcactcttcctttcatgaaagatttctctgtagcatgagatgctatttgatagcattttacttagagttttcaaaataggagttaatcctctcaaaccctggggctactttatcaactaagtatgtgtaacattctaatttttttgttgtcatttcaataatattcacagcatcttcaaaaggagtaaattccatctgaagaacccagtttctttgctcattcatgagcaaaaggtgtgagcatgataaagttgaatgagaagcaactcatcattcaagttttatcatgagaatttagcaattaggctctacttttaattttagttctcttgccatttccaccacatctgcagttacttccatcactgacatcttaaacccctcaatagcattcatgagcgttggaatcaacatctttcaaactcctgtgaatgttaatatgttgacttcctcccataaatcttaaaccttatgaaccaacctctgctaacttcatacttttattctgcagcttcctcacctctcttaaccttcatagaattgaagagaattagggccttgctttggatgaggctttggcttaagggaatgctgtggctggtttcatcttctatccagatcactaaaactttctccatatcagcaataaagctattttgtttttgtatcattcatatgttcactggggtagcactattaatttccttcaagaacttttcttttgcattcacagttggctgtttggagcaagaggcctagcttttggcctatcttggctttcgatacaccttcttcactaagcttaatcatttctaccttttgatttaaagtgaaccatgtgtgacttttgcttttacttgaacactgagaggccatgatagggttattaattggcctgatttcaatattgttgtgtctcagggaatagggaggtccaaggagagggagagagatgggggaatggctagttggtgaagcagtcagaacacatatgacatttatcaattaagtttgctatcttatttgggtacagtttgtggagacccaaaacaattacagtagtaatatcaaagatcactgaccatcataacagatacaataataatgaaaatttaaaatattgtgagagttaccaaaatgtgaaacagagacatgaagtgagcacatgctgttggagaaatggaactgatagacttgcctaatgcagggttgccacggttcttcaatttgtaaaaaaatgcactatctgtgagcatgataaagtgaagtgcaataaaatgagatatgcctatactcttcattttggttcttttgagttagtttttgttgacttgtcttggactggtcagtaaggggattataggtatagttcattttggattcgtgggtattttgtttacatttacaatacaacaccacactgggaagttaagaaatgagtctagaacttttatttcaaatcactgctgctttctttctttctttttttttattattattatactttaagttttagggtacatgtgcacaatgtgcaggttagttatatatgtatacatgtgccatgctggtgtgctgcacccattaactcgtcatctagcattaggtatatctcctgatgctatccctcctacctccccccaccccacaacagtccccagagtgtgatgttccccttcctgtgtccatgtattctcattgttcaatttccacctatgagtgagaatatgcggtgtttggttttttgttcttgcgatagtttactgagaatgatgatttccaatttcatccatgtccctacaaaggacatgaactcatcattttttatggctgcatagtattccatggttgtatatgtgccacattttcttaatccagtctatcattgttggacawttgggttggttccaagtctttgctattgtgaatagagccgcaataaacrtacgtgtgcatgtgtctttatagcagcatgatttatagtcctttgggtatataccyagtaatgggatggctgggtcaaatggtatwtctagttctagatccctgagaaatcaccacactgacttccacaatggttgaactagtttacagtcccaccaacagtgtaaaagtgttcctgtttctctacatcctctccagcacctgttgtttcctgactttttaatgatcgccattctaactggtgtgagatggtatctcattgtagttttgatttgcatttctctgatgcatctctgtgttcttctcatgaagcctgtgtaaagggacagctaaatttggtgccacctgtaatataaatttcaaaatattaccaacctgcctaatagggatgaaatatacaaattcagcattctttatttatctaaggcaagtggctattggcagattttatgtaatgtaatgacatagttatgatagtgtcatttgggtggcagcaaaaaaattaaatgactaattcaaaggtcttttggggatggattttggaaatgtgttggtatttagtaaatttgtggtctagactaaattgaacttaaagcattaatgaacaaactatttcataatgaatacttgtttctgcttttgtattacctgtaggacattcttctaatcataagtatatgatacagtccctgacagagagacttacattgtagttgattaagtagaatcaatacttaaaataatttgcaatatttagtagtatatgtagtagactaaacgaatgactcagacggtaagttttgaaaactttgagagaaaggtgttccctaggatgattggaaaggcttcatggagaaggtgggatttgcactggactttgagcaaggtagagtgtagcagaaagaaaaggaggacactctagacaaggaaaccgatgtgagtggaggcttagataaagaatacatttagaatatttgggaataaggaatggacatgtttgttggaatgcagatttcctatgggacctctcaggagataaggtcagcctggaagctaggggaatgttgtgtaaggctttgattgctgggccaaggaattattctaaaggcagtaagaaaccattaaacatttttgaatagtgggaggatatgtgagaactgagactttatgaagactaatatctttcttggaatacaggatgattgggaaggggagagagattttaaaaagtacaggcatttctcaaaagaagacatttatgcagccaacagacacatgaaaaaatgctcatcatcactggccatcagagaaatgcaaatcaaaaccacaatcagataccatttcacactagttagaatggcgatcattaaaaagtcaggaaacaacaggtgctggagaggatgtggagaaataggaacacttttacactgttggtaggactgtaaactagttcaaccattgtggaagacagtgtggcgattcctcaaggatctagaactagaaataccatttgacccagccatcccattactgggtgtatacccaaagaattataaatcatgctgctataaagacacattcacacgtatgtttattgcggcactattcacaatagcaaagacttggaaccaacccaaatgcccatcaatgatagactggattaagaaaatgtggcacgtatacaccatggaatactatgcagccataaaaaatgatgagttcatgtcctttgtagggacatggataaagctggaaaccatcattctgagcaaactatcacaaggacaaaaaatcaaacaccgcatgttctcactcataggtgggaactgaacaatgagaacacttggacatgggaaggggaacatcacacaccagggcctgcctgtcatggggtggggggatgggggagggatagcattgggagmtatacctaatgtaaatgctgagttaataggtgcaacacaccaacatggcacatgtatacatatgtaacaaatgtgcacgttgtgcacatgtaccctagaacttaaagtatatatatatatataaagtacaggtgtgagatgaaaaggatctggacttctgttggcaaaataggaagagaaagggaaaggatgaattatagtagtagcttgtttgatatatcagaattaaatatttatttgttggcctactgtgattgagagatttaatgcctgagtgactgggagaagcaaagtgtttttttgtctggagggatgatgtgaaggaaagatgggttgagttttagatattttgagttccaggtgacggaagggcctgtagatggtggacccagcaggtagccgagatggagaagactgacactggctctcaagtggaagagacatcacttttccatagggtcgtcagttaaattcatgatgttggctaagagagaagatctacagattgatgactgtatcctggagatgttaggggatgaagagagggggaggagccagtgtgtcttataatacagaaagttcatggagaacgaaaactgaaaaaataccactggatttaagatacttgagaattgtgagctatgtttgagaggaatagttggaatccaaagtacacaagtaagattatgactaaaatatatgataaagaaataaaagcaagtagtacaggccatgtacttgttatattcctgttggttctttctttgcctgttctttagtgtgtttacttaaatggtctggcaggcagataaaaggaggtggaacttaaaactgtccaattagttctgttttttttttttttgcgatggagtttcactcttgttgcccaggctggagtgcagtggtgcgatctctggctcaccgcaacctccacctccacctcccgggttcaagtgattctcctgcctcagcctctcgagtagctgggattataggcaagcaccacactgcctggctaattttgtatttttagtagagatggggtttctccatgttggtcaggctggtctcgaacacctgacctcaggcagtctgcctgccccagcctcccaaagtgctgggattacaggcataagccaccgcgcccggccactagttccctattaagagactagttagagtaactagagggcattaggacgaaaccattagttatttggattataccatggatcagattagttataagataattgaaatttgattgtaaatttaatgaaattaaagatgaacattgatgttactgaaaattatactttgactaaatactacgttttttgtttttcttgtatcttagtttctatgcagattttggaccgctgaacttggcaatggtgtacagatattgctgcaaactaaacaagaaactaaaagtgagtattgtagtgatatttataatttggaattaaaacatttgaaccataggatctgctcagtggggttggtgtgcacaaaacatttagtcaggtgatcttgatctctggaaatttatgtgagtagttcacctagagtttgaaagtgatcctcctgattataccacaaaggacatgttaacctctttcagttttcagaatgaattgcaatatgagctgaatgaagtcactggaatagtgatctaagaaagaaagcacaaatccttttaggctgttgttaatgagtctctatcaaattccctcctaggataatttttctgaaaccttcagatatgcctgtagaccctgtttccaagtgatgaacagggcttatcatggctggagctgtgtgcataacattttctgtttggtcaagattgaaattttttgcatgtttcttaaatgttctgtgtagttaacagccaggtgagattgatgaaccagcagcaacagagaatggaatttacctgagatgatagaattctggtcatacatttagtattcatctatagttttgatttcacatgggtatctggtttccttttctgtacttttatgtggattttggcatgtggctttttttttcttcttcaagcatatgaggaaactcatctatatacctagttttagtaaacttattttatcacacagaaagcaatatttatctccttgtcttccaatttctaaatgaagatctttactatttcagtttgaaagacaaaatgctatacagaggactcttaaggataaatactaaattatattgctcaggtattttgctctttctgctgggtaaaatgttactggtgttacatagtacaatgccttggacatattaactgttctgtgattattttttgatttgattggtttttaatgaacttaggtataaaaagcagtctgatagagaatttcctgtagaatatgttgtatccttatgaatttacaaatttttgccattgatttcaaagtgagaggtggacatggaattataccaaaaagaatcaataatcatataacatattaggttggtgcaaaagcaattgtggtttttataattacttttaatgttaaaaaccacaattacttttgaaccaacataataaaatctgttttactcaacttttgtaggaattaacttacaaagttgtctgacttgaaaagatacatgtaaattcctttaattaagccagatctgtttttaagaaaagaagccagtattttagaaagtaaaatagaggtttttgcaatcacctaggaagtaaataatatcctttttatagaaaatgaacttttaatggctgagtaaacaagaaaaggataattaataaataatggaagtctatttttttcttttgaagaccaaggaatttctttgctgtcttgattagtcattagtatgtagttggtatgaattgggtattataattaatctgggaaccgagtactatctagggtagccaaagagaaaggagtcattatcaggaaagtaaaatcactggtctgactcagtgttctacttatagcagttgcagaagagtagatgggttgagttgagagtattttttctaccattttctacactgaacagtatggtaagtatatgtatgtaaacttgtttctatttgctttcatttataatgctgtgtttcgacattattaataaagtttaaacactctccttggttcattttagtggtaaggtaatctgttggttgtctggaatgacatatgtagctttaggacaattaatgggcactgcattacttgctgaatgattgaattttaaaaacccaaatgttgataagtcatgagttgtctcaatgaagcatactacatagaatctctaattaggagaaaaagatttactgtaccagtccaaagttggaattgcttcagttttgtggaatcttagtttcttcatctgtaaaataggaattatagaactgtcacagggtggtggttagtattatattagaaaacatgtcttagtctgttttgcattgctataaaggaataccagaggctaggtaatttataaagaaaagagttttatatagctcatggttccacaggctgtacatgaatcgtggcaccaacatctgcttctggtgagtccctcaggaagctttcactcaaggcagaaggtcaaggggaacagtcatgtcatatggcaagagagggagcaagggagaggggagggaggtgccacactctttttaacaacaaaatcttgggggaactaagagtgaaaacccactcaatcccctcagaatggcaccgagccgttcatgagggatctgcccccatgacccaaggccccacctcttaacactggggatcacgtgagatttggagaggacaaatatccaaactatatcaatatgtaaaagctttgtacattttaaagtcctatacataataaagttaccaatgtaacatttgtgaattctgatagggaatataataaagacagttcttctacaaaatcgatgaacacctgtttctcagccttaaagctattgtttatatatgggaaagctgtccaatataattttaggaatctaaatgaccatttagtcaagactcagaaagggaagcctgggaaaggtgtgtgacttgcccagtgcagcaggcaaagtcagggctagatttcatggctcttgaccacatttttcctgttcttctttccaccttcagtaggaaccatagcctctggtttacagtcatcctttgttcactcttagcattgccccagctacctgaccttgttgtcccacgctgactttgaggctcctctgcctctttcattccagtaagtgttagggccattctgtctgcttcacttccacgaacccagactccagattctcccacttggaaaatgcctttgttactcactttgcacattctgtccctctcacactactgggattgctagaccttcagtctccctgttctctcagtccactggcaccctgctgatgtctcttgcctgcagcccatggtcacttacttcagtaaggtcttgggtactttgctttcttgtctttctgccttgccagctctcacccttgttgttttcccagtggatgatttcatgcactaatttactgggaagcagcagtacccttgccactcccagccttgcactttactctaccataccagctgttccatgcatttgctcatgaagaccagtctgactgggatgcccttaccctctggcttgatagctcttcattctttaataccttgtccagccaccaccctttaggaagcatcttcttgtccttttggactggattgagggtgcctcccttgttttcccatcattctctgtgcagatctgtatcgttgatgaattgtaattacctgtttgcacctgtcattctcactagactatgagcttctagagggtggaaggtggaggatgtcatgtatctttgtgttctcagtgcctagtgcagggacaacagacacacagagacttcttttgactttgtcatgatccccttcatttgcagatccccctttctccttttgcttccagaggtttcagaagaagagcctgcctccatccttcctgtgtgctgatttcttaaccctttgttatctaacttttgccttccctactctaccgaaactgctctaataacgtcttaaatgctgaatctgatggcacttgctggatcctcaaactcctttacttctctgagtaatttcgcactgtgttaacyagtaacttcgtcttaggattcttctcttgtgtgatttcccagttcttttaggcacatttcattttttagtttggaaatttttattccttccaagaaagcttgtgtgatttttcttcctcattctgtgctttatatagataggtaatattttgctgtacattttattccaatcccaaatttctcatttttgaaatgagaagatgtttttttccagttgatgatttgagttggtgatttatcgctatttttgtgtttctgtgtctatatgcattctattcccaatgtccttattttaattatgtcaatcagaatggaaaattatcccatcaaacatatgcttagattaaaaatccaaacataaaatgcatcatcaccaataaaaaacctgctgcttatttaaactgtactttaaaaaattgtcagtactaggaattaggcagtaataggttgctgtttggtctttcccctaggataggggaagcaatcaaaagagggaagatgcattgaagtgagaacaatttgttaaactgtgtatgttatttaatgttaaatgtcatcaatgattgatagccttgagctggaattattattctggtaattcaagggatccataaacccttgaaattatacaattttgtatgtatttacatttttcttctgggaggattcatggctttttttcaggttctcagagggatccttgacacagacatgctaagaacactgggctaaagtcttctgaaaaagaagactttactaacaaaagacaaagttgtggtattttgaaaaaactgaataccttcctctattcttttttttttttttttttttttgagagggggtctcactgcgtcacctgggctggagtgccatggtgcagtcatagctcactgcagcctcaaactcctgggctttgatgattctcccacttcagtcaactgactaactggaaatataggtgcacacttctgcaccccacccagctaactatttttttttttttttttttttagtttttgtagaggcagggacacactatgttgatcaggctggtcttgaacttctgggcttaagctagcttcccgcctgagcctcccaaagtggtgggattacaggcatgagccactgtgcttggccgtcaatacagttttaattattgatttcattttcctctgagaaaaataaaacctgagcttggagaaaaaaaaagtctctgaaaaaaggggacattttctagggcagtggtttttcttttttttaatacctgctgttatgaatcaacaggataattacagtaatcttgaggactattttaaaaaaggattaaaggagtattcacagaaatgtaattttaaatttacaaaacatcccatatagccctttcagggtaaaaggggaagtgggtgggtatcatgaaaccaaccattatattgaagcattggaagtacctggcagatggtggggcttagggaatgtccttgttgctgaatgaatcagtgccataatcctatcctgtaaaccaggcacctgccaccctatcgggggttatatacaccagaactcttttgatgtaatgactagaccaccctattataactacaaaaacatgttgagatttcttcatgtggttcttttctgtttctggctcataggtttgtggggaagaaaagcaagctacattctggagatagttcatgtagtttaaagaggttctaggggctccaaagcaatgtcaactcccataggagcgagcatataccgagtttgcaaggcaagaaccccttatgcctgttaggaatcctcaggcaggaagaaccccgtttatagagaatcccacgtgccttcaattattgattattaacacgatgaaatcatcttcatgagcaacttttctctgacattttgacttctgctttaatcaaatgtgccatttcattaatgaaatgtattgggtttgaaacaaagtgggccacacagagacacctttttctttttaaagaaatgattcgatctatttcatcttggcactaaataaaaaacataaaccatattttgttttgtacagccaaagaacattttccagagtattcctttcctgagaaagttggaggtaaaacttgtaaaggtcatggctgctcacaggaagacctgctcattttatcgcttttgcagtgagatgaccactgattgctatggagatgctgattgctgcggccattactgggctagcctagccacctgtaagagaatgatgccttggtcattgcggtccctgtgctgtgatctccttaatatgaccatgatcattgacagaacttgcatgtttaggaggtgcatgggctctatttttattaaagagcatattatccaggctgcattaatgtcttccttagctcagtcagactgattcatacagcttaattaaatacagcattctaaccaaataacttgaagattttacttttctgtgtttctttaaattgacctttaactcttttttttttttggctttggctttgagcctaattgcatcaccttttgttattgaatggttaagtagtttgtgctctcctgactgaagctgaacaagtgcatgatttgtgtttgttgccataatccaagtgtagcctgagctatttgttatttgtgcagcttgtcattatttttttctctctccaagttgctgtggcttgtgttttacaaggagtgatcccactagaatataacctttcacatagcttttctttccaagatagaaaatgtctggggtcaatacccttatcttaatttgtattgttctatcatagcagtcattgtactttggtttataagtaccattaagtatttatgatatacacttatgatttacataacaggggcaaaactttgactctcaggtaagcaatacagaaatttctataggtttgattatgttaattgatagtcaatactaaattccaccttttatctactatattttttccttgttaaatgaaacacttactgtacctgtaattagtatcattttattggtccttgtgtgctgtaaatgcatcctatacagttattctcctctgtttttaataagccttggccaatattttgcattaaatattcattagcctttgaggttagagagtgggtttcttctccccttgtcactgcattgctcagcaaagtgtttgacacacaacagctactcaattcatgctgatggaacccatagaaccttcttcagccgcagtatcctggcacccagatttagcaaattggtcacctgtggcctgcattctgtccacagacatgttttcttgagcttaaacactgtttaaaaaattttaattcatagtcaacatctgcagtttatgaaagcttcaattttgtcttcttttaaatattgcagtatctgaccattctgcacccagattccctcacaagagcagtaggttggagcttactgcactttggatagggaatgcttttcttatttaccagctgccccacttcagattcttggcacctgagaacatctgaatttggaacttctggaataatgacatttaaggcagcttaattacggaatcattaaagggacttgttcctaaggtgttatcacctggaatgcatgaatttacaaattgtaataaggtttgctgaggaatctggggaaatgtgttttttgtaaaatgcttttaaaaggcttattgcatgatttagaattcctttttaagagaatgtagagttctttcgagactacttgaccagatggacagtgttttagcttcatataaaagattcccaggggtgggaccagttacatgtttatgtagtgcttctccaaaatttagccatatcttagagtagtggatttcaatgtgtggtgtctggaccaacagtgtcagcattactggaaaacctgttagaaatgtaaattctcaggccctactgaatcagaaattctggaggtgagacccagcaatctgtgttttaataagccctgcaggtgattctgaaccaatctgttaagagaatgaaatataatacaataataatataatgtggtttagagttagatttagttatttctgaaaagtcttagtactattgaccaattcaacctgagaattattcaaattctgaagcatgaaacttgttatggcctcataattaagatttacacaaattatcaggctctgtgagaaagttttggactgatcctgcttactactcttactgtgtaaatgttcgtcaaaggccctctctgactctgggcttatgttctccttgtaaaacacagtgtgctcattatattttagccttgcccaggacccctagtctgggagacgttatgtgtctgattaaactggacccctctggtgccattcctattgctttggataatggtggaatgtcacaagtgagcaataaatgcgagctgttgttgcggttattatagagggctggctatgtccacttcagtttagaaagttcagaagggtatttgctttgtaatccccgcactttgagaggtcggggtgagcagatcacttgaggtcaggagttcaagaccagcctggccaacatggtgaaaccccatctctactaaaaatacaaaaattagccaggcgtggtgwcacctgcctgtagtcccagctactcaggaggctgaggcatgagaattgcttgaacctgggaagtggaggttgcagtgagccaagatcatgccactgtattccagcctgggtgacagagtgagatagtatttaaaaaaaaaaaaaagaagagtatttgttccagtttcaagatagaaatctaaaacataaggtggatagtggctggctgcagattgtgatttgtaatgggtcatgtgctgtgctgctacagagctggcaaatagtccagaggtctcagtattctttctgtgaccctctctattttatatttacactgtatttattggaattgaccaattttaaacttcactttgctatggcatacagtgtttttgtaacctgtgagcttcttgtgtaaagcagaaaataatctgtaatagagcaggtagctcattgaaagcctgtggctatgatgtaaccttgcaagtgttctccttgaagggcccactcatcatatttgctttgtaatccctgcactttgggaggctggggtgagcagatcacttgaggtcaggagttcaagaccagcctagccaacatagtgaaaccccatctctactaaaaatacaaaaattagccaggcatggtgacaccttcctgtggtcccagctacagaggagacagaccagagtaaggaagaggccactgtccaatttagaggcatgatattctcctgatattagggcagaatctgagaaaacattgactgggctcatacatagagtcctgtcctattgtctccaaactgtgactttgtctgcatggtaaagttcttccatgaaagatctcaaaagagaagttaatgttccatagaaggtacttcaatcatcgatgtctccactgggtgttagtattgcttcttctagggtgctttgattatgtaatagtattttttaagtgggggacatgcttaaaatttgagaggaaaaaacattaaagagttttttttttttaaatcagcccactcatataaaacatcagctaaacaacggacaaaatattttgttacccctcaaatttttattccaataccaaagtatcttctctgttgaacagcatcactggtagaaaactgtgggccaggatgaccataagagggaggcccagttgtgaaaaggaaagacattagcaaaaggcctaattttgatattagcaaatttgagattaattagaaaattaattaggaaattaggacaaggtctaattttgagattagtagatttttctctgctctcattaactttgaattcgttttgattcctcgagtgagagaactcacctctcagtgatttgacctcggagatgctggccaagcttcgctaagcaggaaatcatttcttggctggtgtgcttttgaaacttaaccgaggaaactgaattccaaaaatacctaagcaaagtaaatgctagcagctttaaacattttcctaaaaatcaggcagaaagctctaaaaagaagtcagttatgtttgcttcctgtggggagtttctcataggaaatattttaaaataaagtttctaggaagattttgtgaagatcattctctatctgatgtaatttatgaaagcttataaagtttaagcattcttctaaaatctttaaagtgttaatttgtattatatttacttaaataatatttatagctatacagtgaaaagaaagtcttcctcagagttctgtcctttagttttatggctcatgttccaggataagtctctgtattctatatactttagaatgcgagagagaaaaaacgaaaccaagtaaacacaaaagattctactccccccaaccccctccaaaaaaacccaaggaagaaataagcatcagtgatgaaagaacagcactataacttgtccctttcagcaagtagatttgtaaaataaatacagtttcacattattaaccaatagcagtagtttgtcataaaacctaaattcttagtagaaaagagcatcaaaaatgataatccagacttgaagatagactgttgatattttcttccccacaggtattttagggaattaggaaatgtaaatagggagaggctgggagccataagagcgtcgagtccctatgctcagtctgactcatgtttattgagagcctggcctgtgtaaggcaktatttagatatttgcaattcagagatgataggagatgcttaggtctgaagagcctttatttcctttttggtaaatcaaacataacttattgatggggaacaaataagtggcaaaaccaaccaaccacccaacagacaatgagacaatgaaataaaacagaaaaaggcaatgttcaggcagtcagtagttccaaattgagaaagcaaagaatcaagtgtcagcaccattggttgtaacctttacatccctaggtaacttcaatgcatcaactcaactgagctgaattaaatgctgtgcctttgttctctctttatttcataggagtatttgtataaacctgtcaggaaataagggcattggcaataagatactttctttgagtcaaatactaattttttttgtttgatttttgtttgtttgtttttgagacaaattcttgttctgttgcccaggctgtactgctgtggtgtgatcatggctcactgcagcctccatctcctgagcttaagtgatactcctatccagtctttttgtagaactgggtctgtctatgttgctgggctagtctcaaattcccagccctaagtgattctcctgctttggcctctcaaggtgttggaattacaggcatgagccatcacacctggccttacatactaatttttaaaagtttaataaaaagggcactactggctgggtgttgtggctcatgcctgtaatctcagcactttgggaggccaaggcaggtggatcacttaagcccaggagttcgagaccagcctggacaacatggtaagacctcacctctacgaaaaatacaaatatttgccaggcatggtggcatgtgcctgtggtcccagctactcaggaggccgaggtgagaggatcgattgaggctgagaggtcaaggctgcagtgagccagatcatgccactgcgctccagcctgggtgctgggtgacagagcaagaccctgtctcaaaaaaaaaaaaaaaaaaaaaaggtaaaagataaaagggtacagccattttcagataatgtgattctaggagttcgagaccagcctggccaacatggtgaaactctgtctctactaaaaatacaaaaattagccgggcgtggttgtgggtgcctgtagtcccagctgcatgggaggcaagagaatggcttgaacctgggaggcggaggttgcagtgagccgaggttgcgccactgcactccagcctgggtgacaaagcgagaatctgtctcaaaaaaaaaaaatatatatatatgtgtatatatatatatgatttttggttataaaagaaatgcctgacttggagtgaagatttcctggctcattggagggatacactttctgtggttacatggtaaagccagagtgttgcagtttcatcttagaacgggcttcagagatggaagagtttttttttaatttgtagacaatagcaggatcaagaaaagtacatagttgagctctatttaccttttttaaagaggttctaaaagcagggattttctgtgtgttgtagtcaatgtataagatagaaaaagctgcttttatagtcaatgtgaatttatagacaaatactgaaatgtacttttgtgcctgtgttttttttgctagctcattaaagacagtttatgtacctatatttagaaaatcaattgtcaaaatacataaattttgaaaagtgaggaaatcaagcagatttcattgagttacattgtgttctcattgtcttatacttattcgagttttgattaataatttgatttcattttaccagatctttttgtcatttcttttcatgtttagcatgtgtacaacataccatgttgattattttgaacttagttaaatacttgagcatgcagcatattgcctggcatataacaggtgcttaataactgtctgaattcatgaatttaatagatggctattgtaatgtgttgtattaagatgtttgctgatataattttttaatggtatttttccattaaccaagtattttcagatattaaaagggggttgttatataacatcccagaaataaaatactaatattggtcttcaaaaatacgattttttggagatcatagtaaactggttgacattttaaaaaattgtgttatatgaaaactatagataatattcctgggagttggagtggcatgtagggggtaacaaagtgtgaagagactttctgtagaagatttagaataaatagtcaaaaatgtttccagttaatagagatgccaatattttaattattttccaccatattagtttcttttctgggagagaaagatattaattatattgttgattcttacattatgattgggctgtacaaaatctgagctagtaattctctaaccctcaaatgccatagaaattaaagttgaaagttgttaaattttatgggttgtagcacatcttgaaggttaagagatgatgtttgccttctgtatatgttaactttgtctctatggttacactaactctttttatctcctctttctagtcatacagtttgtcaagaaagaaaatagtgcactacacctgttttgaccaacggaaaagagcaaatgcagcatttttgataggtgcctatgcmgtaagtaccttcttcatgattattttctataatcaggccagtgaaatgctaacactgtcaaagaaaatccaaaccagtttttcagtgggattgagagacggtggagattattagcagtttgggaattgatctgtagtgagaaatatggactagcagtggtggaatgtttactctttagattttattttctactagttaatgagagaatcttgaaactgcaatatgtagcttgaattccacagttatataggtattttaataaaaagaatacctaccaaggacatttctaggaaaaaaaaatgtgtgtgtgcatgtgtgtatgtttaaatgcatgaaatatgatattatggaagattttaaaagacttgacgtgttcgttttttgggagaagaggaaaccttagattgcacaggggaggattgttattatttttatcaatccattcattaatttatacaattgtttgcagtaggcaaactgaatataaatcctgcatatattatagcttccctaataactacaagagacttttccaaaactaatttcaattagaaattttgttctctgcagacactaacatgtcagtatgaattccacatgaccatgctgtagagttttaggtggtgattctggaattttctatatatgctgtgattgggcaaaagcttagaaagcagaaaccatcagagctaaaacatacttgcagggatatgtgtgatatcagctgggaatatgctggtttaaaggcagggagcagagaggtatcatttcccctcatccttggggagggctcgtgctcctctgaagccatggaagcaaccctgctgagtgacttttcaagggcctcattctaaggaccttgagggaagagggcaccagctactagacctcaaactctgccccatcaacccaaaagctctaggggaaaaagcccagcagtattgctggaaaagctgtcagctattgcagggtgcaggctgagaagagtggcagactgtcagccaggctgtgggctggggccttgcttgtagcactgaggtgcccagccctgcccaccttttgtcccttgatgtagctgcaataaacccttggcctaccccttgtggcagcattctttcttgctctgyagatagcatggtatagtacaaggaatagtgtctaagagtcagaaaacatgtttttcatcttgaagggctctgtgatgatgcactttatctctctcagctttatttagtttccttatccgcaaaatgagagggttggatgtaatgacccctacatttcctttcagttcttaggatactgagagtatttgtagtgccagccaggctattgcttttattttaagagcatacatgaaaagctggcagttagcatgaaggttcagtgaagttctggtaagctgaatattttttaccttacattgataatgactactcatttgaaattgatgattgacactgtgattgaaatatggaaaaagactgtactaatttctggattcaagccctgtaaacaaacgtgtttttcctgcagggttttgtgatgctttgtaagcgtgttaytwgtggatcctttctcataaaggattgccatcaagaagaggtcatttgccactcttcgcacgtctttcttttttttttttgtgaggaccaaatgatttttattcatattcgtctggtttatctacccaaagtgttcaggacagtgttcagcacatattaagcttgatatagcagttatctatgatgatgatggtaacgatgactctgtatagtcactgtgtttctgaggtcttgtttggtaatcaagaatgtgtttagaactatctctttattagacaaggtaataaaccaaaagtttccaacttcctgtacatgttgaaagttttgaataaagatccttggatacaaaacatggcccacatggctcaaaattaattctgtgacataatattattctgaagtcatacttattttgaaagcctaaaggtttttcttttttatggctataaaaatatcaccaagctagacattttaattctgttgagatatacaaatagaattaccgcagcagcccacacattctatgatttctaaacatttaaacatcaatggttttgggaagttgctgttgtccttaacagttcattaaaagttcagatgccttttgtgagagcccaacttttctacccgcgaaattgtcttttcagaagtcttgccggatgttttctttgtttgcctttccatgttgctgtttaatttgatagatttcattttctagttgaaaaatagtccgttcagtctcataattcttactacagatatccaatttgactccatttctctcaatttagatccagctgtgagttgcatgttctttctctgccagtttaaatcttgaatatgttttcttaacttctgaagttctttctgtgcatgttcaatcatatgaactagattttcattgtatactttccaggcattacatccatgctgtgacattagtttcagattctcagttgtaactgcttgatgctctaactaggccatagaattgtttacacattcttgccatgcagtaatgccatttttttgaccagaggaaggggctggaagttcatatcgtttcatactgagcaattcagttggttgtcgagcagccagtctctcaaattcatttctcatcatgtcagtttcaaaagcagaataatccaggactgtcaggtatctcaggtagttcatagtaggttggtatctgcgagtttacttctccaccagcactgcagctgcttcctgcacaccagaggcttcataaccttgatcaaaatatggatcaagtggtcaatatcaatcaagcggtggcacacgactgtaatcccagcactttgggaggctgaggcgggcggatcacaaggtcaagagacggagaccatcctgaccaacatgtctctactaaaaatacaaaaattagctgggcgtggtgatgcgagcctgtagtcccagctactcgggaggctgaggcaggagaatcgcttgaacccaggagtgggaggttgcagtgagccaagattgcgccactgcactccagcctggctacccagcgagactctgttccccctccccaccgcaaaaaaaaatatatatatatatagcagtgcatccacctcaacctctccagccaccaaacctgtgcctgccattctggggacctcaggtttgccctactcttctcatttctttacccctttttccctcccttgcatcttctctctcttctttccttacttatttatttatttatttattgagactgagtcttgctctgccccacaggctgcagtgcactggtgcgattgtagaccattgtatcctcagactcctgtgctcaagcgatcctcctgcctcagccctccctagaaggtgggactgcaggtgtgtgccaccacagccagctaatttcattttatttttgtagagacagtgccttgctttgttgcccagcctggcttcaggactcctggcctcaagtgatccccctgctctggcctcccaaagtgctgggattacagatgtgagacaccacacccaacctcttctttcctttttaacacctattcttcctgttttgtttagtgtggttcttcattttagcagggtgcctctagaactttgaaaggattaaattagatgcgttgagcttgtcacaaaatactctgtgacaaaatatgtcttctgatggagaagtttccaccactttaaagcaaccaaaaggggaaaaagcagtcctagcatggtggaagaagtgctgagtacagcatgagcttgtcttacacactagttacagtcttgagaagcagtgtgaagtgattattcttgaactggtcatgtsccaattgatttttctaattttgtaactgtattccccagagggctttttgacacaaacccttaatacacacggaactaaaaattgrcagtggatccttaaagagaattttatgcctttcttcrtattgtttgtatgtatttacttgttgacagtcttgtaagatagtcaataatatccattatacatatatctcagttaaaatttacatatattaaatgttgctagttggataagtgtccgttttctgggggaatcttctctggatacaaaagacctttaccttcggagcagccatgtaacttacatgaggcaagctaggtaggtaggtatattttatcaaacagaagtctttaagagtgaaggtgttcctgttcctaaaatgtggaatcggccctctgttaagtggcattgactgactaataaaagtattttgtactaagacaaacctttttctcaaagccttagttttctcatttgtaaaatttggataatacctgagtttccttatctgcttcacaggattattgtaaagatcaaatatccaactgcctgtttgatagctccatattatacatctaaatgatacctcaaatttattgtgacaaaacagaagtttttattccttctctccctaaatgtatttatttcccaagtcattccctttttagtaagtggactaccatcagtgacttgctaaatcaaaagagtagtcattttgatttcttttgttcgctcatcccacattctacttattcgtaagtttggtcagctctacctctaaaacatattgaatcagaatgtatctttccatctctgttgctatcacctagcccaagccactgtcattgttcacctggattatgaccacagctttatatgttgtctcctttttatattcttgcttcccattaatttagttgccatacaactgtcagagtagtcttttaaaattgtaaattagatcacgtcattaccctgtttcaaatctgttattgctcactgatcttggcataaaatttatccttaccaatgccattaagatcctttctgatctgaccctctctacctctgtggtctccttgctcaagttgctcccctcatgctggacttctaactgaaattccatgcttgttcctaccaaagagccttgatatttctgttctatctggaatgttcttacttcagacctctgcatgcctggctctttctaatgttactttctcagagagattttctcttaatttctaccctgttacctccacccctagtcatcctttagacctttgttgctttattttctttacagcatgctactatttgaaattactttgtttatgcatttacttgcttattatctctttcccagactagagggtaaggactttatctgttttgttcgtcgctgtgtgtggagggtgataaaatatttaacaaggggttaggccgggtattcacccgttgagttggaagctgggacagggtcctggaggcttcttgctttgctgaatcttggggaagtctagggcctagggggtgggcgtgggtcccaaggaagagactaggatggccagtgtggagtggagtggtgtgctgtgggctgcagctatttaccaactggtatagaactatttcagtatttgaacactatcaatttagagctgtgcctggtatgtaatgggtgctctgtaagtatcttttgagtgaatgaataatgggatgacaaaacatgaaagaaagaaggtaatatatgggaaactcctgaaaataatgaagttggacgtaaggtataaagtggtgtcttcccctttaccagaatatttgtagtcatgactgagccaactttggtttttaaagatacagaatcaaagtaaagagcatagaccaagggtagtaacaagtatacaaaattacatcactacctagcctttttttaaaaaataaacttgtattttcccaatttttttgtggtaaaatatacgtaacatgaaacttgctgtcttaaccattttaaaatgtacagctcagtggcattaactacttttcaactgttgtgccacaaacaccatggcttacttttgagtgtgccatcttgtggcacttttggtttctctgttagataatgacttcaagtatttcacagcttttgtgtttctatttccttatatctaagtggggggagactttttatgctttctctcatagagctgtcataaggatcaaaaaggagataaaatatagaccaagcttgtttaacctgcggctggctttgaatgtggcctaacacaaattcataaacgttcttaaaacattatgagattttttttttttttwaagctcatcagctatccttagtgttagtgtattttatgtgtggcccaagacaattcttcttcttccaatgtggcccagggaagctaaatgattagacaccctgatatagaccatcatgttcagtgatcttaaagccagggttgctggaatgatgtgggcactggagaccacagtgacacttagcagatgctaggcacccattttagggatgcctctactagtagagcatctcttcaccccctgcattgtgacattgtgctccttgagatggaaggctcagatttaagaagagaccagctttgtcagaaaggtgtttcccttccagggcaacactcagtgcagttttgaagttaggatgtttagatcattgtagcatctaaaacactctgatatgagtttgaaaaagatggctttttaaaattatgagtatgaattaattaggttcttgccatgtgcttaaagaccaagtcttcactagtacctgtgttactatattgttttcagttttgcaggcctaggtcaaggagaatttggatcaggtcaccgtgactgaagaattggaaaataatatgtatgagaagatgttaaaataagtgtgactgtatagcttagaaaattaagttcagagttaaagaaatacagtttttttttctgttatgtggaggatgcttaaacagaggtggtagccacattatatactttccttacccacttgttaagtctttgcattgctaaattagaggtctacattgtggattaactgagactagcctgaaccagatgtcatgtctgaattgggaataacaagcctgaggtttttagactgtctaaccatgtctgtgttggctatttattttgtagactacacttaagacctaagtagttatactctactgctaagtctgtgactaattgcaaagaagccattctccatttggcttagtggttgtgagcaatgactttaacatagccacaggctcactgggctttgaatccaattgttagttgtatgccctgagcaagttaacttatccaaactcctgtttttttcatctttaaaataggcataataataccctattttacttgcggtgaggactgaaggaggtcatttatataaaggtgtcatcggtgcagtgtctgacgttgtatgcacttaggaatgtctggtggccctggcagggaagctgtgtggccttccacaaagttttctgacccagtctcctacttcctatcactcacttttgtgcgtagaccctttgggctacctccctgatgatcggacagctacttcccctctttctgtctgcccatcttcctcttgtccatcatatttttcacttaaatacttccttggctcagtaacaacactcatatggttgttaatctgattattgcttagtataattcactggaaggtaggagtatatttctctccaaggatgttattttaagggaatattttgtttaaaccaaatgaatttgtgagatctgtagtcaggtattcattagttcagtaaatctttgtttagctactatgagcccttcctagcactatggtaggttctagggaataaaatatatatacatataaacaatgcctagcttaaaatgtgggacaggtgagcaataaacaattgtttaaagcgggcaataggtacaattgggtaaatatgaatttatctaacaaatgtttttttgaggtattttcatgtaacaggccttgttcctggagttgaggatactaaggtgaatgactccctgcctgttggtgtgggtgtggagggctgggttcagacctggagagaggggaggttccaagatggtcaatcccagcaggccaggttgctgaggaaccatcagacagggagaatagcatgaaggtgatgatgctttttctggtggtaggggagtgaagggaggctggaagaaaactagttattttaaatttttaatttaattttattttaaatgtccgttttgaaaaggggataatctaatgagaagataggggtgtttttttcccttacaattaaaaaaactttaaaaagtggagtaaccacattgtagaagaaatgtggaaaaattctctcgcagttctaaacctgaattatttattaggtgtgattgcagtgtagttttttgagccttttaaaatttagcctatgtatgttttgccattttgctattcaggtgaccaaataatatttcatttagagagaataccattgtttaacattttagatttctttcaaaattttttataatgtaacacatctctttctatattataagtgtttcttttcgtggatttttgtctttagagtgccagaaatagggtaaataattttaaatttcagagtttttaagactcttggagcatattgctatacttaagcaagtttatactaaatttggtattatgtgaaatctccaatttcatgtaaactttgcatattgggtatgaacattacagttttagaaatttaattggtgaaaaatgctacctcattgttttagtaatcatttttttgattaatgaggttgattattctcatgtttttatttatagatttattaactgtttgaaaactttgtgtttttatatttgtttcctatatttagaccattttagagtggataagtgctattagcctccattaaaaaagtaagttagccaggtacagtggtgggagcctgtagacccagctacctggagactgaggctggaggattgcttgaggccaggagtttgaggttgcagtgagctgtgatcacaccactgcactccagcccagaccctgactcaaaaaaaaaaaaaagatgaagtcattttatctgtgtctatttgtttcaatagatacagactactagaaatcatgcccatcagtccaagtttctgtaaaaaattaggaagtccatagacctttcctgctgttactcattagaatgtcagaatgctctattaaatacttctgtatacctgaatataaatgtgcttaattggaactgctgataatggacctattgatttttgaacattaagccgtctgctgagtatacagaaattttaacagaacagtattatttaaaagtggttasagtgtgtgtgtttaaatcattggacactgatatacccagacaattaactgtgattttgtttttgtttttattgtttggaccaagtatattattttgcttatattttgactcacaattctgtaaattctgatttcagaactactttacattgacattaaaaaactgtagattaaataaatgtcatttaaaatgtaggtaaaattatcaaaaagttggttcaaaataataaaggcatttactttaaatatttattgaaccaataatatattagatgtcagctactagtgttctgtcatccttctctgtggcttgttggtaaatctaacggcagtgtttgcttctgcttatagaagttagtggagaggaagggaggggaggcacatggctggggctgggcaatttcctgtttgcagttccttccttttgtagtttgataggcaactcttttgtgatgttgcctgtaaatgggccagtcttttatctttgtaggcttgtatttttggtggctttgaaacagatcaggctccttaaactcatacagcattttcaatttcagactctttgagactggacattctgttagccttctgcatatgggtagagcagtgtcacctcttaacttttcttgcctgtttcatttagctgtgggcgaggaaaattagctgtttgcttttcattactggaagatttatcaagttaaggtgcatcaatcttttcagtttttttttctttttttcttttggcatcctgataataaacttcctttgtgttgtaaataagctctcaaatttatatacacatacacagctgcacacacaggcatacatactcactgcatttagtactatatatttagtagggatgcactgtgtatgcttacagtaatttactcacaaatttctgaatcttatcagtagctttggaataacatatactttctgtgtgaagaagctaacatccatttgtttcattttaggttggtgcaaaagtaattgcggtttttgctacttcaaacaatatatactgaattaaggggatgtacttttttttagcacttgaaattatttatttaccagtttattatctctccctttaagggaaaggactttgtcttattttccacaatagccccagtatctagaacaatgtctgacacatcctaagcgttcaataagtgtttgtgaaatgaatgactgtttaattgataaataagtcttggttgacttccacagttttgtggaagtttaatatggagtaatttaaaacctgtgatgtgcttaaagataaattatgaagtcggtactaattgtaaaaataacagcaagaatcagtgttgcaaagcattaactaattttcttaaagttactgagtaaaacaaagtgtgttatatagaactgaaatgggctttgttaatactgtacatacaaacatttgaaattaatattgtggataataatgttaattttactctcagcattgtttctgtttttctcaataggtgaaactacttatttatacatataagtatttgctactaagtgtcaacgatttttttaacagccatccttgcagtctcaggataatttccagttaagaattaattcatggggccggccacggtggctcatgcctgtaatcccagcactttgggaggccaaggtgggcggatcacctgaggtcgggagttcgagaccagcctgaccaacagggagaaaccccgtctgtactaaaaacacaaaattagccaggcatggtggcacatgcctgtaatctcagctactcaggaggctgaggcaggagaatcacttgaacccgggaggcggaggttgtggtgagccgagatcgcgccattgcactccagcctgggcaacaagagcagaactccattaaaaaaaaaaaagaagtaattcatatgcttgaaagaggaatactagaaaatttttaattagagttggatcttgaaaatttttagctgcatgcattcattatgaaaaaaaaaaaaatcggaaaggaggtactcaaagccctgaagacattatccattatcagagtgtgacttgaaattgtttgccgtgcctgatatgagagcatgttctgtacatgtctacctaggcttcacctggcatttacccgagtgaggactatcagtgttccattttatacaaatatctgaacagagcaggctcacatttagacgtattccccatgcagagctacaggcttccaatcaatgagatgtttactagaatatatacagaaactgaaggtaattctttaaattttttgaaaaatgaggttatttggctgcctggtaattgcagcatggtaaaatttgatattgaatgtatttgattgtgtttactgttttcttttagttttaaaaataaacatcttaattagaaaaaaaagacccacttttgcaagactggtgaagtatctccacagaacactcactaggaagaacccttctgcagtcctgctttgtcatatttcagttggagaatctgaacccagagaggtcgagtaccttgtccaagatcaaacccagctaatggagaaggactagaaccccgatccctaagtttctagctgggagctttatccagtcatatagcatgtcaccgagcactgctggtcttggtatattatactacatctaaaccataatagtctgcaaaaagattagaaacagcatgcagtgtggaagagtagaattttctatttagaaagcagtgttgtagtgtttcaaatacactagtcatacagtttcttttccaggtagcttctgagctttgattctggctaatggggctaacactgccaaaactttcgtgtaccaaccagggacaatggtggttgttctcatgtttactttggtgatgtccatggatgtgttggggtaggtctaagtgcaaggagtgatagggggataagagaagcaaggaatgatataaagtaggttgggctggtatcttaggacagagttttccaagctttattcactgtaattcaccataagaaacacattttacattgcagcctagtacacacacatacacacacgccattcacatgtataattgaaacaagaggttcatgaaacaattcttacaaggtgtaaagcatactgatattttatattctgttctattttatttaaaatatgtctttacccatcaaattgacttcactgctcactaatgggttgtaacctgcagactgcaaaacatagccattggagaatctacttactgtgcttagatccagaaggttcttgaatgttcttagggcattgatttttggcattgaatgagcaggtgattgtttgattgctctgcatctaggctagtttgcaattaacatgaatggcttaaggaaaactgaaagtattctgaagactgctctctctaaacatcaagatgcatacctgtctctggatggtttttattcagttggtacttgactttttgggaaaatctgagtttgttttaagccttcaaataatatgatttatcttttcttatctcactttcatttgaatcactgtgttacccttaaagccctctcatactcctcccttcttcctggcaaccaaaatgtgcattgattcagtttgggagaaccttgattgagaagcctgtagctaggtcaacgttgtgggccctgaggagccagcgctgagcctgccttactgggtctgtcattttagtatctcattgggcttagtttctaagtgtgggctgaaaagttatataatgtcccattcacctcaagacatcgaatcttaaaccttaggtttataagggttttcttgattgaataattttaatttatgtaaatttttatttcaagaaatgttttctatttgatagagtgagtaaaattgtggcctttcccctattttggaaagtgaataaattcattaaacccctcttcatgagcactttctgaaattttaaataaaagaagagctaaccgcttgcagtgagctgagatagcgccactgcactccagcctgggcaatagagctagactccgtctcaaaaaaaaaaaaagagctaactgcaactgctgttgagtttgctgtgtgttcagttatttctaagatttttagtgttcaaaatagggttgccatgctaaaaaacagactgtggccatgtaaactactaggttcccacgtcaccaacactctgtctctgtgtctttcttaattttcttccttgttgctcttctgccttagctttgcttttcctgtgcctatcttcccaaacccccgtaacaaatgcttgtaggggctttgaattttcattatggaaattcaaacttttaattgatgaggacttaaagccaggggtgtagttatacagcaaattcatgggtaataaaactaaatagtgggatggctggcgtggtgtctcacgcctgtaatcccagcactttgggaggctgaggcgggtggatcatgaggtcaggagatagagaccatcctggctaacatggtgaaaccccgtctctactaaaaatacaaaaaattagctgggcgtggtggaaggtgcctgtattcccagctactcgggaggctgaggcaggagaatcgcttgaacccgggaggcggagcttgcagtgagctgagattgagccactgcactccagcctgggcaacagagcgagactccgtctcaaaaaaacaaaacaaaacaaaacaaaacaaaacaaaaaactaaatagtaggactgggaaagtgtaacctcagcctcaaagaaatattttaggagggctgcagtacctcatagagttatttaataagaaataatatttgtggttcatagtttcaaattaatgagcagacagacaagcctttccatgtgaatatacatactgtaggatgaatcagacaattctttcaagagtgggtgtacgagtcatttagtgggcctgctttgggaaatttcttaatttaagaaaccataattcccttctctgataaacctttcctgatgttttctccctagtttttctgcctacccctcactctctgcctcccagctcttcactgtcattttcttactatctgacttagaacatggctcatttatagcttttcttacttcattttgcaattaattgcacataatatgatctactaggatgagctccttgtacttacttgctttgcacactcgcccttgtaagaatgagctttttgagtaaagggataactcttacatatttttttttcttcaacttttattaagttctggggtacatgtgcaggatgtgcaggtttgttacataggtaaatgtgtcccatggtggtttgctgcacagatcaacccatcacccaggtattaagcccatcattcattagctattcttcctgatgctcttcctcctctgaggcacagtgtgtgttgttcttcactatgcgttcatgtgtgttctcatcgtttagctcccacttatgagtgagaacatgcagtgtttggttttttgctcctgtgttactttgctgtggataacagcttctaactccatttatgtccctgcaaaggacatgatcttgtttctttttatagctgcatagtattccatggtgtatatgtaccacattttctttatccagtctattattgatgggcatttaggttgattccatgtctttgctattgtgaatagtgctgcagtgaacatacacgtgcatgcatctttgtaatagaatgatttttattcctttgggtatatacccagtaatgggattctgggtcaaacggtatttctgcctctaggtctttgaggaatcgccacactgtcttccacaatggttgaactaatttacactcctgccaagagtgtaaacatgtccatttttctccgcagtctcaccagcatctgttgttttttgactttttagtaatagccgttctcactggcatgagatrgtatctcattgtggttttgatttgcatttctctaatgatcagtgatgttgagctttttttcatatgtttgttggccgcaaatatatcttcttttgagaagtgtctgttcatatcccctgctcacttttcaatggggttgtttggttttttcttgtaaatttgtttaagttccttacagactctggatattagacctttgtcagatagatagattgcaaacattttctcccattctataggttgtctgttcactctgatgatagtttcttttgctgtgcagaagctctttagttcaattagatcccatttgtcaatttttkcttttgttgcaattgtttttggtattttcatcatgaagtctttgccccctgcctatgtcctgaatggtattacatagattttcttctgggtttttatagttttgggttttacatctgagtatttaatccatcattagttgatttttgtgtaaggtgtaaggaaggggtccagtttcaattttctgcttatggctagccagctctcccagcaccatttattaaaaaggctgttctggccaggcacgtttgcttatgcctgtaaccccagcattttgggaggcagaggtggatggatcacctgaggttgggagtttaagactagcctggccaagtggtaaaaccccgtctctactaaaaatacaaaaaaaattagccaggcttggtggtgggtgcctgtaatcctagcttctcaggaggctgaggcaggagaatcacctgaacccaggaggtggaggctgcagtgagctgagatcgtgccattggactccagcctgggcaacaagagcgaaactctgtctcaaataaaaaaaaaaaaaaaagaaaaaggcagtcctttctccattgcttgcttttttcaggtttgttgaagatcctatgtttgtaggtgggtggtcttatttctgagttctctattctctccattggtctttgtgtctgttcttgtaccagtaccatgttgtttggttactgtagccttgtagtacagtttgaggtcaggtagcgtgatgcctccagctttgttctttctgcttaggatcatcttggctattcaggctcttttttgattccatatgaattttaaaatagtttttttttctaattctataaagaatgtcagtggcagtttaatgggaatagcattgtatctataaatgacttcgggcagtatggccattttcacgatattgattcttcctgtgcgtgaacatggaatgtttctctgtttgtttgtatcctctttgatttctttgagcagtggtttgtagttctccttgaaaagatccttcacttcccttgttagctgtattgctaggtattttattctttgtgtgctaattgcgaattggagtttattcactgtttggttctctgcttgcctgttgttggggtataggaatgctagtgatttttgcacattgattttgtatcctgagactttgtggaagttgcttatcagcttaaaaagcttttgggctgagatgatggtgtctcctagatataggatcatgtcatctgcaaacaaagataatttgacttcttctcttcctatttgaataccctttatttctttctcttgtctgatggccttggcgagaacttccaatactatgttgaataggagtggtgtctcactcgtatttgtatctccagtacttaacatagtgtctgtctgtgctattttaaaaatttatatttatttttattttttaagttgacttcgtaattgtayatattcatgggatacatactgatgtttttttaaaatgtacatgtaatgcttttatttaaaaaaatcttttattttaggttcaggggtacatgtgcaggtttgttgtagaggtaaatttgtgtcataggggtatgttgtacagaatatttagtcacccaggtactaagcctagtacccaatagttattttttctgttcctctccctctgccagcctccatccccaagttggcccaagtgtttgttgttcccctctttgtgtccatgtgttctcatcgtttagttccagcttataartgagaatatgcagtatttggttttctgttcctgcaatagtttgctaaggattatggcctccagctccatccatgttcctgcagaggacatgatcttattcttttcaatgactgcatagtattccatggtatatatgtaccacattttaaatatccattctaccattgatgggtatttaggttgattccgtgtctttgctattgtgaatagtgctgcagtgaatgcacatgtgcatgtgtctttatgacagaatgatttatattcctttaggtatatactcagtaatacgattgctgggttgaatggtatttctgtttttaggtctttgaggaatcaccacactgctttccacaatggttgaactaatttacactgccactaacagtgtataagtgttcccttttctctgcagcctcaccagcatctgttatattttttgactttttaataaaaaccactctgactggtgtgagatggtgtctcattgtggttttgatttrcatttctctaatgatcagtgatactgagctttttttcttatgcttgttgactgcatgtatgtcgtcttttgaaaggtgtctgctcatgtcctttgcccacataatgaggttttgctacatgtgatatatagtgatcagaacggatccaggcaatcagcatatcaatcatctgacacatttataatttctttatgttggggacattcaatatcctccttctagctatttgaaaccatatattactgttaactgtagtcatcctacagtggtatggaacactagaacttaccctatctattaatagctataattttatatcctttaacaaatatctccttatcccctgtattagtcctttttcacactgttgataaagacatatctgagactgggcaatttacaaaagaaagaggcttaatggacttacagtttcacatgactggggaggcctcacaatcatggcagaaggtgaaaggcacgtctcacatggcggcagataagagaagagaacttgtgcagggaaactctcctttttaagaacatcagatctcatgagattcattcactatcacaaacatagcacgggaaagacctgccctcatgattcagacacctcccatcgggtccctcccataacatgtgggaattcaagatgagatttgggtggggacacagccaaaccatatcattccactcctggtccctcccaaatttcatgtcctcccatttcaaaaccaatcatgccttcccaacagtccctcagagtcttaactcatttcagcattaactcgaaagtccatagtccaaagtctcatctgagacaaggcaagtcccttccacctatgagcctataaagtcaatagcaagttagttacttcctagatacaatgggggtacaggcattgggtaagtacagccattccaagtggaataaatttgccaaaacaaaggggctacaggccccatgcaagttcaaaatacggcagagctgtcaaatcttaaagctccaaagtgatctcctttgattccatatctcacatccagtcctgcccttgactcctgtcaccaaggttgcagttgcaaggctttcaatttgaaatcaactgcttgttaaaacataggaatggacccatcctgttcaaagaatgtaggaatatgtgataactctcctaatagttatcagttcytaataggaactggagaatccttgaatctcatcagtttgaatgtggtaaagtatttatattcccttcaaaaatgtctgaaattttgagaaattcatcagtacttgcaagtgagttggagttttagcagcaagctatgtattttawccagagtcaaattttaagtttttagcctgggacctgggaaacatagtgaaaccttgtctgtataaaaaataaaaaagaattaaccaggtgtggtggtgcatatctgtagtctcagctacttgggaggctgaggcaagaggattgcttgatcccaaaactttgaggctgcaatgagctgtgattgtgctactgcactccagcctgggtgactgagtaagactctggctaaaaaaaaaaaagaaaaaaaaatttttattttagttttttttccccaagaaacatatctttgaaatgtaatgaaaatagtgacaaaatggggataacattttaaaagtttctaaaatcattttttttccaagacggagtcttgctctgttgcccaggctggtgtgcggtggcacaatctcagctcactgaaacctctgcctcccaggttcaagcgattctcctgcctcagcctcccgggtagctggattacaggtgtatgccaccacgcccagctaatttttgtattttagtagagacagggtttcaccatgttggccaggctggtctcacactcctgacctcgtgattgcctgcctcggcctcccaaagtgctgggattacaggcatgagccactgtgcccggccagatatataaatttttaacaaaacccaaaaacatttggaatatcctggcattgggctgtgtttaaaaagtatattagactttacacatgtgtactgatgaaaatattttacttctgaattaatagaggaaattaaagttgttaagatccttttattacaattaaaatttgggggatttaaccacgatggtgatcaccgaattctcgctattaattcaatttaaaaaatttttatctctctcctgctcctttttattaaggaacattggttgatctagacctcaggttaagtacaagaacttcaggatgagattggaggtctctgacttttacygtgttactctagcaatgcggagaataatttctcctctgaagaactgctctggtagagctgtatagtgatttttttttgttcagttataggaaccgatacatcttagagaagatctctccctgacctacctaaccagcccacccttctccactccccatcctcaccatactggtaaacctggataaattaacttgtcacaggaggcagaactgacaggcccaagagcctcctatattattggcattccagtcctttgcctctaccttcgcagccctcagcttacttcgacacccatagtgcaagggaacactgttgtgtgaataaccgcttacctcttttctcctctatcactctttcttgttgtctctgtgtacctttccctctccatttttgtttttgtttttcctactggttccatctctttctccttcctgtgttctgatcacttctctcctattgctttaaaaagttttttttcttcagacaagaatgaaaggaatctcctattggtttgtttttccttccttttcctcctttcttagttggctgtcggagttttttgggtgtgtgtaacagaaattgactctgacttactgaagcccaaaacttagtaatgaatttcctggaagtttagtcaaaagagggtagtagagggctgctgtggccttcccttctaataaaaactctttcttcattttaatgggaaatagtattttcctctctccttttgtgtgattcatttgttcattctttcattgaacaaacagtcattgagcacctgggccagacaccccttctgagctctaaggatatggtaatggacaagagagagaaaatccctgtcctgacagagcttagattttgctgggagaaacaaacaaataagaggtcagtgataatggcaagttggtgatgtgctggtgactggctggctacttcagattggaagttcagagatgccctctttggggtggtgatgctgataaagaggaagaacattctaggcagagaacaacacatacaaaggctttagagtgggaatgaactaggaaaggctgaggaaccaagacaaagctgctgtggctaaaaaggctataatgcaggcgatgaggccaaagtctctgctagggcttgtatgtgagagcaagttcgaattttattcttcgtgacctgtgggtctcttagggagctgaaatgacctgacgtacacttaaaaacactttaaaaactcaccttttagaatgtcacttgaagctctccatggtacagttatctgtatcgttccgatttctcttatgctactctgccataatgctctgattacttaacctttaaaggtttttgtgaggagtacttaaagtgggggatctcctgggattagatctgaaatgatatacaagggatatgccatgaggtcaggaacatacttgctttgttcttggtattatccatggtgcttggtactggtaagtctttgctgaatgaagaaatgaattacctggtgtgtagaactgtggaaagctctctgtttttctccttttccttcctccttcttcattttccttactaccaggaaacctgccattcaagtcttgttgctcataggaagatgggggtgagaaattgctggccagggtgaaggggggctgttttctggaagtagtgaggtctgcctacagtagtgagccagaataggagggaagttcccagttactgcagggaaggtgggtgaacttcctgtatgttttatatatatrtatatatatatatatattttatatatatatattttatatatatatattttatatatatatattwtatatatatatatagtatgtatgcaatggatctgttgattgggtttaagttacttttatttaagctgtaattgtttcagttctgctgtttgtggaagttagtaagctaaagtatgtagggaacatgtttacttaaaaaaatctatgcacatttaagaacgattaattctgcagctacttgggaggctgaggcaggagaatcacttaaacccgggagatggaggttgcagtgagctgagatcgtgccactgcgctccagcctgggtgacaagagcgaaactgtcaaaaagaaaagaaaaaagaaaaaaggatgattaatttctgttatcttctcgaaggacaatactgtcatgtggcacatgtttgaacagttggggctaatgcacagaaaaattgccacagaatcttttctgcaaacacctgactgatgggcaaaactcttgtttctcctgctttctctaagcaacaactcttgtaaatactggaagagaacaaccagttccttgtttgtgtgcattgttagttttctattcttcagtgagttcaaagaacagtagcttacaagttactatgattctagacctgagatttagttcacatgctttgtggcttttgtgttagaagtttggataacatctcacctgtaaacttcctgaaatttgaaaaagaataaaatgactatatatgaaaaggcttcttaaaattttaattttaaaaacaattctatgtacagttccttaagtatatactctagttactaaaataaatacattgggttgctggtctaccaccttctctcttcgaggagatcacagactgcctaaagttgccataagtacatgggaagcaacccccacaagtttggttccatccctggcaagtttggtaggcttcctcctgttattcccagaaagtttatgatctttcttgttcacttttctcctcaattactttccttccagtgacagcaagaaaatttcctctcatatttgccctgctttccactgcctcagatttgaaatcagctgtaatcacaatgccaaatactgaggaaagttatgcattttgaagcagaattgtatataattaagtaccaatcaaaacattagaaataattcagggttcactttaaagccattatagatgtattccttgatttcttcaagtttttctaatttagctttccctcaagtattagcattgagggaagataattaacttaagaaactaacacacttacttaattattttagttttaattttgaaaatagtgtcttctactacattttattttagatatatgattttaatgataatagtgaatatattatcatgtttggactagcttaggaaacttaaaatcctaagattttgtctttgggaaaatatttccagaagtcaaaatattatccttggcaaggcacaatggctcatgcctgtaatcccaacactttggaaggccaaggcggtaggattgcctgagcccaggagttcgagaccagcgtgggcaacatagtagaccccatctctactttaaacaacaacaacagaaaacaaaacaaaacaaaaaaccgcatattatcttttayagataaatgtttggagtataatgtatttgcaatttaaagactttctataattgctaacaggtgttaagaggatttaaacatccagtcctggtctgttacagtggatctgcrtcaccatcttcattacaaagttatggttccttgccttgtaaacttgatccaattcagtcctgggtttaaataacatacttttttttcattttctttcttcatttggaaagttttatgaaatgaagctcatgatatacccagaagtaagcagtgaaactcagcaccaggagtttttaacatgaaaccattcagtttgggagtatgtattattcaagtgatattctggagtgagtctgtttttgcgttttatataaggactaccttttgatgatgaatgataaatgttctacagggttatatttwgctgcatgttgtaacataacagtattttgctcagcttgcgtaagactaagggactgaggttattttggggcgacacattttctcctttcccccattaacgtgtccttttaggtttctgtgtgttaagaacattggcttggtgtttcctttgtttgctttataaggggttggactagtttactgtcacacaaccagctcagtgaggtctatgctggtacatgaactcacctcaggcagaagagaagcattgtgtcactgagacaatgctagcaagagatgtgcatttgtgctggctgtagctgtcagttctggaaggatatctttttaggctgattatgaaaattctggttgtaatcaaattagatgggaagacacacatggctaatattgtctgccattctccctaaattgcccatcaaaaagctcccactggtttcactctaattatacccatgagaggggtgagagagtatttctattctaaacgaattgtcaaataaataaagtctgctgtttgttgactgtatgttaaatcccagcttcaaattaaactgtaaagagatgtcacatgagggtatttcagagcaaacagcacctcaaacaaaaaacatactcatttctagacctcattctcatgaggattcaaatactgaaaattgttaagtatttttagggtagaaataagtgatgtctatagagacctgatgtcaggttctgcttaacttctatgattagccttgcctccatatttgttaagcaggtatattgtcttatgctttgctgacttcataatctgtgatttataatggactcaaaacttgaagaacaggaagaatgactttattttacaacatgttcaaccaaagactgtaggaaacaaaagacattcattcttactctgttttaattagactatttagcatgatagatttaaaatagactgaatataatacaagttttaaatacagttgtgtttctgatttgtaatcagactgactttcctaattcatatgtgattaacattgaatatttctatttccacaagcaattagaacaaagtggaattgtttatgcatttgagaaatgtataactttttcctatttttaaaaaattataaagttgaatgtagatattgttttctgagtcactggatataatgggaggaaatgattaagaaaataatgttgctaaaaataacaaaattaaacaatttgtttgtgtttgtgtatcacaattaatgctgtctttaggaaaaaacagtttataaattaagtgccctgacatttaagaagtctgagaaccaagttttgggagccaaggaagagactttaaaagttttatgtttcagctttttgcagagttttttgccttgcagtgcatttttatgatggacttctgtttctatgctggacttcttttcatggacttgtgtggttcattctttgcaggtaactggtgagtgctttcctttcctaaaaacaaatccaacttgggaatctaattcttttgttcatgagacattcaaatagaaaaaatgaatacagtgctagtaacagtaactcgcttcttatttcatgtactttgttgcagaaagacatggcccacctcagggatcttctgatattttgataatgggtttggtaaagcagggaccagtggcatttattttatggatgttgatactaaggcatcaggagactagggaggctgtttaaagaggcagaactgagagtaggatcaacatctgtactctataatcagagggttgaactaaatcatggtcttattagggacatttacaacctcatattctgatgtttgtatacatagacgggctttagggtgaaggtgtgagaaataataacagtgtgggtccagattcacccagagacagatggtggaaaggaaaaaaaacattttgggaccaaagtttatctcctttttgttgtcccttgctgtagaagagctatgtgctagatataattttgagcactttacatacattattaattcatttattcttcccgacaaacaaccttatgtgatagttacaattattatcctcagtttatacctaaggcaatggaagcatagagggttagtttcatgccactaatggggaaagaacctgtgtctatgtcatgcttcccctcgtataaaacgcccactatttgtgcaatcgtccatcattttttgagtgtgtgctacatgccaggcatagtgttgagtcctgcagataaaaaagagatggaaaccttgctgtcattagtcttacagcctacttggggagacaggctcaatcaaataaccacagaaacaaactggtatacgaatttgaaggagaaggcagagagctttgagaacataaggcaggggcctgatcttattgggttgccaaaaagactgtctcactttagagctgtgatcccaaggaaacggaggaggtggcatctaaacactgcgatgatgcaaggtaggctcaggttgagtctggtcacttcataggccattcccagccccctttagagtccttgaagtcagtgtctttaagctccataatggagatttcagactatctctgtgccctcgtatatgtgcaggttcctgtgcaaattgtaagcgttaagtaaatatatatgctgattgaattacagtcatctgtggtgatttgtgctctgttccacctcctgctggctgcrttgtatcccatgttggaagtggctgagtgtggcttcagaatagacacagaggaagtgggagagtgaatatttggatgagggagtatgccttgactaaatactttctataagcaaatacaaatcatatgacctagagcttttattttttaaaatcagtctrttgctttctcttgaagcacatcattggtgaattgactctatttggcttgatgctttcatacaactgggctgagaaagttcattttacccctcttttgggcattcccactatagttgtagtgatatagtcttttaaaatctcattcaccaattattaattaagctgaattaacccttttgggtagatgcattcttatccttatatgtttaaagtagctgttcattaaacataggttttttgctgagcatctatctgacaggaggcatctgaaggtttataaaggtatgggaagcttggttacttgagctccagaagctttccactttagtctaaaggaaactaattacaaaagagctgtgaggggcccatcaggatgtgcttatgagtttctatgagggagccagactgactgtgtgaccttgagcaactaattctcagtgcttttcctgtaaaatgaaaatgggaataataatggaacctaactcggggtgatgtgaggattaatgaaccaagttatgtacaatgcctagaagagtgcctggcacatggtatatactgttaactttttgtttttattgttgtcattattgtgatcattatcacctatagttgagtgtcatattctggagtctaaagggtaagggaaaaggttctgagttggagaagaaaggcatcatgggacatagtatttgagtttaggtctaatgaaatataggtctaataggtagaaatggtgaggaaagtattccagaaaaacaacaacaacctcaaataccagagatatcaggtatgtttagggaagggtgaggagtccaggctagcgggtagggttcatttgaggaaaaatgacaaatttacctgaaaaggcaggctgggacgatatcttggtgaagggttggcagtctggactgggctttttgagcagggttgagactttccgagccctgctctggaactactggagtaggcaggaggtggaggcagagagaaatggtgttagtcctagagtacggtgataagggtttggataagggtttgaaataacgtgatgatgattgtcatggaagaaaggtccaggtagttcactgcggaactaatgaaatttaagactcagggccttttcttgcttagttccgtctctcaagctgttgaagggaaaattttttgtaaaatatgaaaagatgtttgtatcctccgtctttgctccccaaatgatgtgtttcaggctcccaaacctggatctaccccataattgaaagagactgtggatggccaggagtggtagctcacgcctgtaatcccagcactttgggaggctgaggcgggtggatcacttgaagccaggagtttgagaccagcctggccaacatggtgaaggcctgtctctacgaaaaatacaaaaaagtagctgaatgtggtggtgtgtacctgtagtcctagctacttgggaggctgaggtgggaggatggcttgagccttgggggtggaggttgtagtgagctgagattgtgccactgcactccagcctgtgtgacagagccagaacctgtctaaaataaaataaataaaaagagagagactgactgtgactgtgaagagataatcagtctgggtattgacttgatgtggctatcacgtgatggagaggccaaggtcaaagatgacttttgagattctgggtctggctgactgggaggaacccctcatgagaaagggggatgttgggagcagccagttagggtgcggtagtttcaagccaagtgagtgctctgcactggttagcttcaccagtaaaagaaacattttcttcttatatctgcccacccccatcctcaattgcagttttgcaagcatgataattgtaagttacacagtgctaaggaaaggactcagcatttctgctgattaatgggcttcagcccaaagcacacatcatagtgatgtctttgtaatgtccacagttagtattctgtgtattctaaacctagttgtctgaaacttgtaaatggagtctctccttttttggcataagtcttccacatttggtaaatcatagtgctttaagactattttaaagttgtaacatcagttttctggaaattgtattttgaaggaatttaattgactaagacatggttgaaatgttaatttcaaagctatcgtgccaatgttccagtggcagcacctacctgggaaaggctattgtcagcatttgtttcctctttttcacacaagtaaaatattaaacaaataaaattgaagaatactctttcagatggccaaattgaatcctcaagagtattttcactttccaagtcacaaaatataaatataattaatgtaggggcacagatttcacttttaaatatatatatatatacatatatatatacatatatacacacacacacacacacacacacacacacacatatatatatatatatatagtgtgtatgtgtgtgtgtgttatgctttgctgaaaaggtttttttttttttttttttttttttggaggaaaaatagcmcctaaaaacaaagctaaaaacatagtaaagtttgaggcaaatgtccccagagaaagatcattagcaaattcatgacccagagtctggttgagacttctctatgaagccatttattgttttaagaatctccccttgtgtatcagagaggttgaattatctgagtagagaaatacagttgtaaattccaaaatgcttcaraaattcacatattattttggagcaggtattaaggatttaatgactgcaggatttagtttaaaaaaatgatttaraagtatttgcagatgaattctaagaggattctatataacttctcatgttggtctggtgttcctctataaaattagtacagacttgatatttgttacattgtttctcacggtgtagtaaacacaaatatttaaaattataagagttatgcattttaatattcatttatgtatagactcagtggcgggttttcccatttatagcaatgatataaaacattttacatcaaattgatttaagtcaaaagtaaatgtgtgtttaaaaagaatgaatggtagtacatggtggtacctacggcagaagttgggaaagtgcatgattaactaatgggcaacattggcttactggtaaacaatataaattgtgctggtttgtagtagggtaaattttattacgctgtttaataaaacctcatagctgttgataatatatatgttaagatactggctctttaagaagcttttattaaagaaactaaaagttatttaagttcttggtacctggaagttaattaaacagaaaaaagtcactttaattgggtgactcctgctcagttaaaaataaaagtatatgttaaatgctatattattaatatggtttctaggacttcttggcaaaagtagggcaattttatcaaagtcgtgcatgtaccacccactaaaatgatgtggtacaccaaacattatctgtgcaaatgcttttgttaagttgtattagtcaaaagtttggggaaagttctggtttgggtttatatatgttaatacctagcgagaaaagtagacagcatattctttctttccccttaggagcacaagagaaaaaatcaagatatttagaagatgctttgaaattaatttcattcagaaaatatttttatgattctgctgagagaaggcaaaaatatttttagaaatattagaatatctggcaacaaattttcgagcattaaatatggattttatttttagaaagagtacacatttgacattgcataactaatttacttacttcacatttaaaaaacagatttgtgtatgtctgtgaaaaagacaatgtgttgatagtagaactataaggtagaaagttcctctttctccttctgatccttcccctgcccttttcctcaaatgtgactacaaactgttaacagtttgaagtcccctaagttttaaaatcaaatggaatgaaatggcatttaggaacttggaagagtggaaaccttttttccagacctatgctaccaactgagtttatattttcaggcagatatgatgaaattgctgtgggctttggagtcagcccactgttcgaattctgttttcatcctagagcaacaacgcgagtttggaaagttccttacctttcttactaaatgtcacttttcttctgagctttaatctagcctagtctgtctctctcctctctctctttttaataagcagacatgtctaagaagatctggcataagaatatgtgacatattttgtcctggaaaaatcgaatttggtattttaatgacccagcatgcattcatgcagtaatgcactcactcatcaggagaacatttccccactttgcccaaatacctaccttcaggttgtgaaaggtcaacctgtaaaagatgccccargaatcttcctggaatttagatggcctctgttgggtttcactttgcacttattaataattgagcactgggataaaaataaaaacaaagggtctcatcttgcagtgtgagaacatgggccatgtgtgctaagtcatgcaggtaagatgaggagcaaagccctgtggggtagccaatctaaagaagcattccatgtgggctggtgcctccctcttgcagaatgactccctccaaattaaagggaattaacgtaattgctcctggggaggaaaatgcatttttgcttttcaaaggttgttgtctaagctttaattatctaatccacacacagaagctttctacaagcagccctcccttttagcaaccagtcacctttcaaatactgcggcatctttaggcttaagaaatcactgcattataaccaattctgttatataacctaccccttagggtacagtaaaacctgttgtaatgttggttactgaaaatggtctttagagctagtgttggtttaaatggagttttgtaattatttgagctgcaactagagtgacaattctccatttttagaatctgtgcctcttgtctggcagcacttttagttatttcctttctattgctttttgtttcacactcaataagctttggttggtgtgtgctttatcagaccttcatgtttacttgccaaatgaatatggggttttgttactaaagttagtatttttaatctatttattttatttttctttctttagaaaactcagaatggactcgttttctagtcctgaaatattaataagtaaacatgtaatatattcctagtgaaatagcttaaagctcaaagaaggtctgtaagtagaggaaaaccctactgttaagaaccaagactctgccattcttgtcattgaaatgcatagggttttgatgttgggacatactaaggaaatagtgccactaattttaggtagagaagattgtaggaattaagctcgtttctgactatagaggaaaaggaccaagaccatcggctcagaattaaaaaattaaattgctcttggaataaaattgagctctcccagtggtttgtattgctcttcacattccggccactgcctggctttctcccgccccctgtcctcttctctcagtcctagccacactgacctccttttcctccaacttaccaagctctttcccacctcagggaacttgtctttgtcattctcatgcctggatagccattcctccttccccttagctcttcctgtggttctccccatctagagtctagatcttaccctgaacatcacccagagacccctccctgactaccttgactcaggtagctgctttccaggcccctgtttatttacttttcagcatttaccttagactgtatttatttttgttgattattgtctttgccccacaagcataaattctattaagggaggtgccagtacctgatacagtgcctggcatatactatatactcagtatctatgtatattacctgggagttgttcactggttttaaggaatccttttttgtttgtgtctttaagattagttcatcttgtcagactagagggatttaagtagctttggtatcaaaatccaagataatatgttttccaatactcttacccatacacattttcacccattttattgtgattttattgagtgtctagagagcaacactggctttcctcaagagtaggctgaaaattcagtagataccccatggatattgtgctcactgtgagaagtctttcaaaatttaccaggcactgaaataactcacctcaggtcttcgatgaaggtcagggaggtgtgcgttggtctttggtgagcacacggtatattatgagggtacaactgtcgctgccattgtgtctgttcagtgtgcctttgtaaagagcctgggatggcctcttcatggatctgccctctgtctctaagcttacccatggagaagacaaaggctgctgcgcagcttcatgctgaaaaggaaatgttggcaagttgttgctttgtaaagatcaacactatcaccgtaacagctgtcactcaaagtggaggaagtgaaatgcaaatttggtgagtaattagttttgtgtcattcttgggtgttctaaatgttactatttatctgtcttaggtaatctatttaaagaagacaccagaagaagcctacagagcactcctgtctggctcaaaccccccctatcttccattcaggtataactcctggtgagacttgggttaaacttttgctacagagctggacactttagagttgggttgtagtgttttttaattgtcttaagataataaccattatgttatatggaatgaaatgagatggtagtttttattatttcatttcgtagagttttatccccctagctagcaagaataaaagagctttcttcttgtaggaatttatttttttctttgaatcctttctatatctttacagtttatgtcaagcacaaaaagtgcctcatttataagctaataatcatgtcaagatttgttggatttcagtaatctacatcattgattcatccattcattctttcatttcataagcagtgattgagctctggtcacatgtcagaggccggggatatagaataagaccctctaagattcttcaggagcacctgtttagtggggaccctaaatcaccagtttggcacacaaatctgactggcatccccaggaagcctttctctcattactgtgttttctaagtatcatcaaaagaagatcttttaaaaatttggggtgaacttgagctcatttaaaaagtagaaggggactgggtgcagtagctcatggctgtaatcccagcactttgggaggctgaggctggtggatagcttgagcccaggagttcgagaccagcctgggcaacatggtgaaaccccgtctctactaaaaatacaaaagttagccaggcatagtggtatgtgcttgtagtcccagctacttgagaggctgaagtgggaggatcgcttgagcctgggaggtcaaggctgcagtaagctgagatcgccccactacactccagcgtgggtgacagagtgataccgtttctcaaataaataaatacatacatacatacagtagaagggaccatacatcaaaactcccataacacttacctctgctagaattgtgaatgattctaatatttttgccttttttgcttgtgtgtccaaatctgcaagcatgtgtattgcttattgcttattattattaccataattaaccaacacaatgagcgaaaggaatgggagtgactgagaagactctgcttgtctgtcttcctcattctgctgtaaactctcagagggcaggccccagtgccttatacttaaaagcacttttagtgaatatttgaatgaatacattaagactaaatcccttaagagtcaagggattctcattctgcttctgagatcacaggaggtagctgttagggtaagacatggggagggaagaagcaacacctattgtgcttaattaaagtgaagtcaaggagtaaggcattgggatttggaccctgaggggaaaatattctgaatcaacctagagtctgaggtaatcagccgtggaagggcaaataaaaaatggcagataatgtagatgaaagttttaatggtgaagacaaagcttatttttccttccacttctaatggctcctatactttgaaagtcctttgtaaaatataatcctattttttcagaaaggggtaataatgctgataattctaagttctaagcaaagtggttaggagtatatactttggaggcagagaaacttcaagcagtttgaagcctcattctgcttcttgctgtctgtagtaaataagtatctcggacaaattacttatcctctctcagccacagtttccttatctgtaaaatggcttcaggtctaaactaaggatcaaatgaagtaataaatttatccttctgcctagtgcaatgtttggtttttgtttttcttgttgttagcattatactattattactgttagtaacataattaatagtagtagtaattattattacagggtcttactctgtcgcccaggctggagtgcagtggcacactgcaacctctgcctcctgggttcaagagaatctcctgcttcagccccctgaatagctggaattggaggcccccaccaccatgcctggctaatttttgtatttttagtagagatggacttttgccatgtctgccaagctgctcttgaacccctggcttcaagtgatccacttgcatcagcctcccaaagtgctgggataaaggtgtgagccactgcacccagtcaagaactagaattttaaaataataataccagaatagaagaaaagatagtaagataattaatactacttaacatagaattgatttcaattctacataaatactaaatttatagcctatttttcaaatatttttcactcaaatacttttatgtaaatatttgaaaatataaatacattaacatagttcagaaatttaaaaaatctatataggaaggtttaagtgaaaattatccctcccatccttgatcctcatctgtctagtcctttccaggtaacttctggtattagttgatttgatatcagtctagaatttctttatgcacgtataagtaaatgaagatatgcacccatttcctactaaaagtatgcctttgaatgtaactctaagttctatctttttgatatcttaggataccaagagttgtatttacattaagcttcatttctaaatctagaatcttcataaaccatacatttgaaacagaaaataccacaaagtagtacatttataatttagtgaagaatttagttgaaagaatactactagttttctggaaacttaatttttttattatgctaagataagatgtgagttgtttttagtctacagttcaggccaactaagactaatggacttctatcaagaatcatcctcatactaaattctgggcagccatcattgcgttggccttcattataatctgggttttattatcaccaggtttaaaaaaaaatcccatttcttatgaaattacacttttgtcttcattgtctagattttttcaactgctgatatattaacacttttaattaaaaatgagaagccttaaaggaatttctatttggatgtaattgttttattatttaaaattttttaaaaatgaagatgattttgaaggcttgttgaaggtgtggttggtatgttcatatacacttttcactgaaatgtctgtgttcccatttgtgctatatattttagtttctttctaataaaagagttttatggctactgtgaatttaaataatgctgtttttcaaatttttttcactttgcaaacatttatctgagcagtcacttctgtaaagccttcctcatttttctggagaggcttggcaggtcctttgcctgtgattccctattacattttatgtattacaaggctacatacaacgttaaagcaaacaccttgtattataattatttgtttgcatggctgactcttctcttgagggctgtggttggttcttttcctattgtgtcctgagggagcaagtatactaaaatatatttattgctttttcagtgccagtcactgtgatagtcctatggatcaaaagatgtttaggacaacttggtacctgctgcaggagagctcagtgtatagtctgtatacatgtataggtgtgtaaaacagttacagtgctttgttagaattaggagagaggtgttatgggaatactgaggaaggaggtttaactctgaaatgggggggtaggagaagatgttaggaataggccccatggaatgcctttcatgttaggatgaaaactggagaacagcaattcaggcactgattttaggtgctaattttatttattcgtatggcataggttgtataatggtatgttaggtagtatatataatacgaagttcacagtatgggtacattattataaccaaaagaatgatctgattttattcctacttagattctattcacctagttaaaattaacaaaaaacgagaattgtgtagctttaactgcctattcttgattaaattaagtatagttgactttagagatagttgaatttctggcttgtgtgacagcagtgagtgttgtgatgtcacttgtgagtcagtctcaggatgttctgttgaattggagggtaggtgtgtcaaaaactgtattcacttttactgagaatagccaatgtgttgattaagagtgactttaggtgaaaatcaggggaaaggggtgtttttcatctaccttaattctttgagtcatccattttcagtgttggcttggcagttagccttcaagggaacaagaggcctttcagttctggggtcagactcagcagagtttgaattgacaawctaggtatgaatctttttaggttctcttcctttcagtgtactactaaattatagtgtatactattgagcaaacaaagtcgtattaatctcagcttgtctaaaaccccaggagaccagtgacccttagtggaatgtccagattgttttcatggcagtcagtggcagtggttttcaaatctacattgttggtgctcacaaaacagtatttgtgaaaatttaaagtcccgcaaaacattgaaaagataaccaatctaaattgtacaattcttatttaagatgtctcttgtgcttttaaattcattttatacttatttctttgtttattggtccatatgtatcaggttggtacgttttttagtattggtgataattcctaaatctcctaaaagccagtttttaaaatgacatataggccgggcgcggtggctcacgcctgtaatcccagtactttgggaggtgggcgatcacttgaggtcaggagttcgagaccagcctggccaacaaagtgaaaccctgtctctactaaaaatacaaaaaaaagtagccagccatggtggcatgtgcctgtagtcccagctactcgggaggctgaggcaggagaattgattgaacctgggaggcagaggttgtggtgagccaagatcgcgccactgcactccagcctgggcaacagaacaagactccatctcaaataaataataaataaataaataaataaataaataaataaataaatataaaataaaatgacatatacaattaaacagggaataaaattatgctgacaataaataacatccagggatctagttctgaagacatatccagagagcatggcatgaaaaataatgactaagtctggaggtaaggttaggtagggtaatgtgctgacagtaatggaataaagctgtgaacattcgatgtcttatccctttagttttttcctaaagcttggagaagaggctagaatttacaggtgtttctcaaagttatgttgatcctcaaacttatctgcatacgtggggagctttaaaaaactactgatccctagattctgtgcccagaaattttgctgtaattggtcaagggtgaagtcagagttattgggattttgaaaaactgcatatatgatgccaatatgtgtggtcaaggttgagaactcctgctctgtaagatgtaccatggcaaaawatatatatatatatcaagtatatttatatatatattatatatatatcaagtatatttatatatatattatatatatatcaagtgtgtatatatatatatcaagtaaatttaaaactctccatcttggagatttacaaagcaaatttctgttttaaagattctgaatggttctgagtaatgaagtaacctgtttagctctgtataacccagaattttctttcttctttttgtttttttgagatggaggtttcactttgttgcccagggtgggcttgaactcttgggctcaaatcctgtgtagttgggatcacaggcatgcaccactgcatctggcccagaattttacaaagtactgattttcttcctcctgccccatactttccattaatatccagcagaactcctgttctgaaacactctgaggcatatttcctgatccacacctgtgtggaacaaaaaacatctcttgggattaaaataatatgctagcattttgtggaacattttttttatgctgtttcctgagagtcttggaaatagatggcttatcaaatcatggtattttatttaatgtgaacaggaatatccaagttttcttgctgttgtgaggccagacaatcttctctaacagaggattcacacccctcccactggcaatccttttatgacatctgtcattaaaatggatgcataatgtttgtgttgagggaggtgtttgttgtgttttgggggatgacccttagtgatatcccagttgctgagctctgtggctgagtcttaatgggaaatctcaaaagtaattattttagatcttctgggcatgccagaacttgtaggtctttaaacaaaggctcaaaagggtcaaccactgtaggtctttaaacaaaggctcaaaaagttggtcaaccacttaggacttggcatcaggctgccttctttttcataaagtaaacatgtgctggtagacgttagatgtaatcataaaatatatttccttacataaaacattgaaccagatttttattagcttaaatatgatattgtgatttttgtcgaagtttgtttagcaattaactgtacttcaaagggaaagttctccttaccgtgctttcctcttgagtatcaaaactgtggaaacaatattttatcctcttttaagatgttcctttcattctcaacttttcctcgctgtttctcagtcttgatctttggggtcatttctgccccatggatctttagtaaacttttgcttttggtgcttggtataatggaagctaattcgcgttagttttgactagtggggatgtgccaatttcctgagtgttgaaaatagatggcttttccagtccaaactgttgaatccattcttaacagctggggcatattttgaataagtgtacccccatgaaaaaagactctttgtcagagttttcttgttaaagtgctaagtaagctccgctatacaggacctgagaagagaaacaagtgtaagtgtctccatgacccattaagaactcacatggaggtgagttatattattctattttttgtctgctggaacaagaaggtgctttggtgatttgtgttgcgaaaattcgctcagactactttttttttttttattcctacctttagggttccagatcagttttaccaaacttagtgaagtagggtaggtgccaaagtttttgtactctttacggtatatttccagtagccttagttgataaatatggttttgaataagattgcagtcatttaccttaatgaacatagtaatagttattattttgttgaatgttatgaaaagctcttaaatacctgagttaaaaccaatttgccattatttttatttttaaagaaaaattgttggccgtgtgggtggctcattcctgtaatcccagtgctttaggaggccgaggcaagaggatcacttgaacccatgagttagagaccwgtgtgagtaacatagtaagacctggtctctacaaaaaaaaaataaaaataaaaattagtcaggggtagtggcacacatctgtagtcctagttgcctgggaggtttaggtgggaggattgcttgagcccagcagtttgaggctgcagtgagttatgatcgtgctgctgtgacagaatgagtccctgtctctgaaattaaaaaaaaaaaaagaatagaaaaattactggttaaatgggtgtcagtcagatgttgatgaaatgcccagagtacaggtcttggtctgtttttctggtgttattgctagttctagacagattttattctgctgatttcaggtgaccttttaagccatgactttagaattgaattttcatgtatctctgtttctttagatgagtaaaatgattcctgtatagccttatgttaaatctgaaaagctgagattctgtttttttgttgttgttgttgttaggtacaggtcacgttcaactttgggccctgcctcctgaggcatgtggttttgctctttcatgaatgggagatggttttgtcctccctactaattctcaatacagtttcgtcttgtaggtctcaatgatataagctctttcttttattgtagctggtacatatatgtcatagatttgttcagaggctggaaactaggatgtactttggacaactgtgtaaagtattttgggcattgtctagctctgaagtatacggacaatatagtctgcagctgaactgtccagtatgttagctagtagctacatgtgttattgaacacttgaaatcagtctagtccaaactgagatagactgtacatttaaaatacatattggatttcaaagatgtagtataaaaggcggggtgtggtgactcacagctgtaatcccaggctgaggccaggagtttgagatcagcctggacaacatagtgagaccctgtctctcaaaataaaaagatttaatataaaagaaaaatgtaagatatcttatttataattatgttcattaatgctgaaatgagaatattctagatatattggatgagcaaaatacactactaaaatttacttttttcttgttagtttattttaatatggttataaaaaattaaaattatacatgaggctctcttttgaggatggcattatatttccattggacagtgatgatctagagtgtttttgctattgtacatagctcataattaaagattgttctatatactttctcctttatttatttgttttcagaaatagagtctcactctgttagcaggctggggtgcagtggccaaattgtagctcactgcagtcttgaactcctgaattcaaacaattctcctgcctcagccttctaggtagcttgctaccactcctgtctaattaaattttttttttttttaaatagagaaggggtctccctctattgtccaggctagtctcaaactactgggctcaagcaatcctcctgccttggcctctcaaagggatcacaggtgtgagccatcatgcctggacacatttttgcttcaaaaggtcaatagttcttagccaccagaggtgttcaggcataagttgaatgaactcttggtaatgatcatttattcattcctgtattaattcatttagcaacatctataacatactaattttcccaacactgtactatactctgggccaatagacataaaagacacgtttcccgtccttaagaagctcatcttcttgtggaggttgtgaagaggggattcagttcagtgcttataagggttcttagatgacctttatgatcctttccaacccattgctctgcaatttttgcatacctcctaactacttgttacccagagaatttagagaatcaaggacttaagataattgtagatcacagtcatttccaaaatttcttagtctcttttctatcagctctttttgtattttttaatgtagtctccacattgtagacactgtgcttctgttctccattctttcttcttcgagtaacttcattattcataataagaaatgctttcttattttgtgtaaatatgttctttcatctctggtttcatctcccattattaatatttataaggttgcttcattctgagtgatttcttagattctcaggttacaagcagtggtatgttggtaaactggctctataagtaaaaagtatttgctgatttccatggtacaaatacttttaccactgctgatttgggctctcaaaatttctgaatatttaacagttcactcttgagagcctatataagacagtgctgggacaccagtgaaacaagctctttaacatttaattgtggatgttgattctagttttcttaaacttaatttttttcctgctgtttttctgcaaaataaacactaaacacaaaataaacaacaagtcccaattgctccttctatttaaatattattcatttagtttttcattcaagaactatttattgactgcaaattcttcctatggtcatagttgtggatttttataaccactgtataatagctgtatagttcagttgactagtatgccagaagtcacatttagaaagatagaattgtggccaggcgtggtggtttgaaggttgaggagggtaagtgggaagatgagggtgagagggaagaacatgtgacttgcagatgtgcaggttctgtaggaagagcccagtggctactggggagctcagggaagatggggccagatacccccaggccttgtggccacagtgaagatttgaactttcccttgagagcaatgggaagtcagtgaggggttatagctgaagagtgatcagattagatttgccttttaaaaatatcactctggcttcagtgaagaaaaccattaaaaagttttaagagtgggtgtaggaaggcagtggcaatggaattggcaagtgatgcattcaagagatatttaagaggtgaaaccaatggtgcatagtgagggataggataaggggaaagaaaggtgagacttctggcctgtagcttgagtgactgtgggagcttttacccagacagggagcgctgcaagactggattatcgttgcagttgtttttttttggagtgggagcagattcaagagattcttcttacatagtgagtttgaggcatctttaagacacccgaacggaaatgccatgtaggtggttggctgtactatttttgaagctttaagaaggagtttgtgctagagagatttgagggtcattggcagatagatggtaatttatggagatgtctagggcagtgattctcaaaatacatgcctttctagcggcagcctcagctccacctggaaacttgttagaaatgcaaattctcaggccctgcctttggcctactgaattagaaacttgaggtggggcccagcagcctgtgtctgtggaactatccgggtgatgccaatacacactaaagttttagaggccctggtctagagagagagagtatggagtgagaagaattttggtctagagttgaaccttgagaaggtttgacttttaaagactgggaagtgaaggatgactttgcaaaggaggttggaagtagtgtttagagggtagaaggaaaatccaggaaccaagagaagagagcaaagtagggagttacttgttgctgacatattaggctaagatgatgcatgcacaatgttctctgggtttaaaataagtaaatccagacagacagaaaataaattagtggattgccaggggctggaggaaggagaatggggagtgactgcaaatgagtccaaagtttctttttggggtagtaaaaatattttggaattactggtgatggttgtacaacattatgaatacaccaaaccccactgaattgtacactttaaaaaggaagatgagactgggcgcggtggctcacgcctgtaatcccagcactttgggaggccgaggtgggcggatcgcctgaggtcaggagttcgagaccagcctggctgacatggtaaaaccctgtctctacgaaaaatacaaaaattagccaggcatggtggcaggcgcctgtaatcccagctacccgggagggtgaggcaatcgcttgaacccgggaggcagaggttgcagtgagccaagattgtgccagtgcgctccagcctgggctacaagagtgagacttcgtctaaaaaaaaaaaaaaaaaaaaaaaggaaaaggagtaattctttagagaaatcttgttttagagaggagtccaaaccgggtggaagctgaaggaagatgtggagcttggaaaattttggttggcttgttctttttggagctagtagggacctgaaaatgtttaaattctgttggaaaggatccagaagagagataaagagatgaccaatggtgttgtatggtggtaaaacctcagagtaggaggggacttttgggttcagtagtctgctgttttcctaactcctgacctccatttcatgttataatgcaggtgaaaaaaattccttagaagggatcttccaattccaagtttgaacatcatgtggggcaggtatctttctgtctcccagggccaaccattagatggtcccgactatattggtgagttgaggaaaatcaacagggaaaattgacttacaaaatgggagggaatgttgcctcttaaatggactttcaatcttattttagtcatttcctttatcctcacttccaggagaacacagtgctgccaattcctaagccttttgagacttacctggtattaattgtgttggttatcatttttttttttggtttttttggagatggagtctcactctgttgcccagactggagtgtagtggcacaatcttggctcactgcaacctctgcctcccrggttcaagcyattctcctgcctcagcctccckagtagctgggattacaggtacctgccaccatgcctggctaatttttatatttttaatagagatagggtttcacyatgttggaccaggctggtcttgaactccttacctcaggtgatccacctgcttcggcctcccmaagtgctgggattacaggcatgagccactgtgcccaactggttctcagttttttcattgtcagtttagtattcagttttcttggtcttctaacttatttaccactcatctaaatgatttctagctttcaaaattttattgttttgtctcttctcttattctcctagtctttgttggtttccatttaaaaaacaaaagcctttaaaaattcaccttttggtcaggtgcagtggcttacacctgtaatcctagcactttgggaggcagaggtgggtgtatcacttcagctcaggagttccagaccagtctgggcaacatggtgaaaccctggctctacgaaaaatataaaaactagctgggcatggtggcttgtgcctgtagtcccagctaattcaggggctgaggctggaggatcacttgagcccaggaggtggaggctgcagtgagccaagatcataccactgcactccagcctgggtgacagagtgagaccctgtttcaaagaaaaaaaaatctccttttagtggggttcggtagatgcatgggttcaatcttccatctttatcttctctctttctcccccagagaatacataacatgttcttgtgtcccttcactgttatagtattttcctgtgactacgtatgagccacatgccacgattaagccatttctttcttgtccagtctttgggrcagattttgagaacctgttggcactatgtggctgtcatgaggattaaatgcgctatgcatataaattacctgacacagtaggtgctcaaaaaaggcatgccgtttccttctctcaatctggaggatatgactaaattctattgcattccttattagatttcaatttgtaaacttctctgtgccttttcagcctgtggtgactgacttgcctagttctgtcggatggcatgttaactttccctcccaactttggaggcctgcagatttgaccaccgggtcaccagagctctccttttagtcactggtaacaattgtggctgtgatggggtaggaggtatcatggaagcctcaccatactttgcagacattcagaaagaataggcctggaactttttctggtagcttacattagtgacattgtttagctgagtctaggggtgggaagacatacttgaaagaataagggatacctctacatcttgtaattttttttttttactttttttaaatataaagaaatttttacccccttttaaaaaacgtaaagcagtagtttttaatctagggtctgtggaagagaattcagagagtcagtgaacttagatgagaaaaaaattatatctttatttttactgaccttaccttatcaattataaagttacatccaattataaatgttgtaaataaactgtagtagcattagcaatataagtgacaatttaatatcacttacagttattatttcttaaaatatttatgctcattccttcctcaaaattgtagtggcagttatcagacttgccactagatcttgttatataatatattaatttgaaaagtgcattttggggtattgcaaatttgtattttagtatatttaaaatacatatttaaactttatttaaatgtaattgaaatagttttctgttaatcctagtttatgcattaaaaacattattctgaggaaatgggttcgcaggcttcctcaggtcactgagagtccatggcacagagactctgaaccccaaagacaagtgtctgcaaaggaatttatggttgtttatataaactaatatttttcttagatccctagtcactcttttctctggcatagcccattaaaatttgctttctaacatatagtttacatttttacaagatatttgaaaagggggctattttattttttgctgacatgtgagttcagatgatatttaaaaacacaaaaacaaagatccctccttttgaaatgagacataaatatttggaataattgaagtttcaggacttaagcattctgttaagttgctttgctaacttcctagttttatgttaggctttcgggatgctgaaactcagggatgatgaagttacatttcacttcatggcttagcagccataggttcaagtgaccttgaatggttgtaaaagttggttttatgttaattataccttaaagcccttaaaggtctattctccccttggaacgtcttctggccccttcctgatggctgccatatgtgcctttcactttgtctagataggtgtctgcctgctctgtttcttgggtcagcagtggaggctgggcagagagcctggagccttgaggtcaagtttcctacctcggacaccttggaacactgtagtgttaaagctctggtgccagttcttgcttaactgacctgaacttgatactttagttttatgttgcctaaagcaggtctgctaaattgctctaaaaacttaaataaagtatgaagcactcaattttcaccacggtaggttcccactccttttgaaggagtacttcatggtgcattagaagctctcgtggctcccagtggctcagaggagattgtttggaagcctgactacattttcctgttttctttcttttcttttcttttttgtaggggaaggatggcatttaatccatgaaaacacctgctaggttctgttggcctacatacattgtctctcctatcttttaagcttgtttttatcatattcctgacaggaggttattcctctgccagaatacctcttgcaatgatgaatgttttacttaatcaaacagttcaattcactgttaataataagaatagtcataatatttatgaagtgcttcctatgtaccagccactatatgaaggactttacatattttaaaaaacataatctgacaacagtcctatgagtgatagctgctatcattaacttcatttcacagatgaggagaccaagattcagcatagaggtaaaataacttgcttaagttcctgtgcagtacctggttgaattggaagtggaactaaggcagtcggactcaggaacgcaggctcttaaatcagcctcttggattaaagcaatttcagaagtgcttcagttaagtgtggtagttaattagtaggatctaatgtattatataagtttaccatgttgatagctgtgaagccaaacaagcacatctccagctgactttggtgttatattttattatttgaatgttctaaatgcaagtttttaatgttgagtttatttatgtttatagggatgcttcctttggaaattgcacttacaatctcaccattctcgactgtttgcagggaatcagaaaggtaataacaattctccttgctgtagttgacacagtagtttaaaaaaatatgagaaaggaataatctcaacatccttatttgttattggagggaagaaaggggagccagtaagtagaaggcttttcacttcttgaaggatgattgatttgtaaaatacaaacaccaggaaaaactgggaggagggagtggcaggggcctttctttgtcrtttaaactatttgtgttccagggcagatttatcaccactatcagctgcagtgcctgtgacattgctttgtcacatgcttagcttcattatcaggcttgatcttggtgtgggagagtcaggaagttatctaagccactgtgctcctctgctgcttggtcccaccccagacccactaaaacaaaaactctgggggtggagccctgcggtctgtatttgaacaacctctccaggtgatttgatgcactccaaagtttgagaaccaagtcatagttatttaattatttctgtatataatggagaagttaaactagaagatttctgagagctctcggaacatgttttagaaacataaattcacaatctgagaagttatataagctatactgtaaattctaatgagggctcaaagtacataatctcgaacatataactatggtttattatcagtcaggaatgtacatattacataacctattgatcataggacatatataataatgtcacatggactataaatatattatcagtagcaattctagttcatttcttggatgtaatataaaactgatttttgctgtgttttgagttgagaaaattggtgtgataaatgtgctacctgttttatacatggttgtttctatttaatttaaaatgaatttaaaccctatcaaactttaaaatggttttcaaatctttttctttctacttaaacaactacagagatactctagcccactcttgcaacaatattaccaaggtgcatttccagtaatgccagttaagagcttctatggagacgttacccaacatataacmgttgattatagcatttggaaaatatgcctgagggaaaaaataatttatttatcgtcactattattattttgccttttctaccatctgctacaggccatttgttttataacacttaaaaaatttagaaagttcacactggaatatcgctgcctgtaattatggtaattagtaactcagtatagaaagttgtggcatccttcctgttgtagaggaaaggtatgtaaacttgtttcatcaaatgttggggttaactcaaagacaaatgagattttggaggatctgatagattgtgcagcatgtctttaagcacctgagacatttcctgtaagttcattctcttacataaggcaccatattctgggctatttttgtgtggcaacgagtagtaccattccaagaacctatacagagtatggccacatttttgcctttttagggagcacatttctctgattttaatgtattggcattgtcataagtatagtttatattccatgttatgtgaactactatacatggatataagcaaaccctttgaaaatacagaggaaaaaaaagtgaatccttcagagagtttgtatatttttctcacttttttgtctggaaaggtgcatatggatgaactcagttttttttttttttttagaatggactaatttaaataatttgttctgcttattctgtaggggttgtttaaaccagtgttatcagaattttgcatttctaagaatcacctgggaagctatgctgaaaatggtgatcctgggccccaaccacagcaaatatgatttgatagttctggggtggggcccaggagtctgcttctttcatatgaattaccctaagtgtttctgatgctgatggcgcatgttctgtgttttgaaaaaacactgatagatgtactggagcttggcttgctagtttctttttctatttttaatgacttgatcatgtaacttttaaatgtacctgtggttttgtattctgttgtaatctgtatagcttcatgatttataaaataaaagattctgttctctttaaaatattagatctgagctagctggatagtttttaaaagttctaagtcattgtttacaaaactgagtatgacttttactttgtgataaaaatatgtttttttttttaaattgtaagagcagtcaagtataattctactttgtcagaaactatctcatgaaacagattctcccaaggtagagttttaggaacaaataagggcctattaagtagaaatattaagaaatattacatatatattatgtatwgtatatataaatatactatattatgtattatatataaatatactatattatatatagtatatataaatatatactatatattatatataaatatatatattctctcatcaaatattattaaggacctattaagtagaaatattaaggaagaaaaaacagtaaaagatgcagggtttttttggggggctaaatatctccctatgataaaaggaagacaaaaactcataagaataattgatttttcttctcctaacaaagaagttaatcactatgatctattctgtcatagttaggtctagttcccaacaggttctaactataaatttgttttatttcattttgtatacatataattttacatacaaaactgatgtaaattagaaatcaaggcatcttttgtggggctttttcatgttattctaagtgtttttttagttccagtaagacagtcttaatgcartataaccagttttataaaaagatttctagatatgcattaaacatcaaaggtttcaagctgtctcttcagattagtgaggatcatttctgtaagtaggagttccagaaatgatgagtagagtttatcaatttagcatggaaaaactaattcaaattctgcttttagggattacaacatggattttttgactttgagacatttgatgtggatgaatatgaacattatgaggtttgtacatttaattttttttacaaaacataatttcatgttgattaattttttccccctgtcacactcatgtattgcaaatcgagtgggtgctaaataaaagcattctggagttttccatagtggtcagttttgtcctttcagccttggttatttcctttgaatcaggagtcaccaaaattttattttggaaaaacaacatatctatatatattctctcatttatatacaatcactttgcacctttagtttataagaaaaatctagtagggtagtaaaattatgttacttttattttagaaatcaggttttatttaaaataaaactgaatttgtaccttttatttatttatttttgaggcggtgtctagctcttttgtccaggctgaaatgcagtggcacaatctcggatcactgcaacctctgcctccccaggctcaagctatcctcccacctcagcctcccaagcagctggaattacaggtgcatgccaccatgtctggctaatttttttttttttttaaagacaggatttcaccatgttgcccaggctggtcttgaactcctgagctcaagtgatcctcttgcctcggcctcccaaagtgctgggattacaggcatgagccaccatgccaagcccccttataatatttttggttgtataaattttattttgaaatatggctgaatttacttagttctaaaagttcactgaatttttttttccccatggcatcattacaagacttttgattaatgtcttgactgctcaaaatgcaggcaaaggctatctccaagctggtttgcgctgtaaggagatgttgaagcagagtaggataaggaggagtctagaagtcattaactttttctgaaagatgagaagcctgtacaatgtgagtaggttcaacattctcggaaggtgaactcatccgttgggtttccccagaggagtaatacaatttatctctatccttagtaagataaggacagccctcacatttggggccctagtctagaatagggctgtttggatattctgtttccatgttaaatgcaacatatctgaaaagaaactgatcatcttttacccaaacatggtcctctgctttgtgtgtgttaccacattgccatcctactgagcacccagcctcaaggctagaaacattgctgttttcctccctaacctagtgagtattcggatcacttctactggtgccacaggatgtattaattatatctgtctttcctctctgttctcacttccttccctctgactcaggtctcacgtcttttcctgtggacctttcattttaatagttctctaactgagcacggcccttctcctcccaggctgccttacacacacctgagtgatcctaaaatagagttctcatcttgcttgtcttgttcttggccccaaaccggctgtttctcccattgccctgctgaaatgtggataaactctcctgtcctggcattcttagctgtgatgagctccagcctacccttctagccccatctcctgttacttcactgtacgtactctgtgttccagctcctcaaactgcttagttactgtttcttgaatatccctgttgcttggctgaggttgctttttcccagattcccatccttttaacctcccgctcctccatttcgtttgtgttaaaatcctgcacagattacatctcacctctggagtactcttcttccctgccttcaatttcatgtgttacaatttgtactttccatttttcttatatcatggctatttgtgtacaagcctaattttccttattaggttgcaaattccctrtggatggaattatgaccaaatagaaaaacatatactttgttcttggatagaaagacttaacatcataaagctgctacttttcccaaaattaatacatttaatgcaatttatgaaaaaaacccaaagagagttttttttaataccataaaagcattttagtagtgacaaagtaagattcccctctaaaatccccaagttagaaacaaagggaatatgtacttataagaaagaaggtcagataacttgtagtacatctgaatcactgaatgttatgcagtcattttaaaaaatgaattgagctataccacttatcttggaatgatttctataatgtttgttgaagagaaaggatatggaagagtgctttaataaaatccatctttgtaataaaacaaacaatagtaagacactccctagcccacacatctaggtgtctacattatatgaccagaggtgacttactttgaagctaatgaagcttaaattttagagagcctcaccccctcaacttgtatgggcaccttttacagtcctatacccaattttgtgttaataattttttactctaagatggaccctcaaattaggtgagtttcagaccccaccaaaacctggatctctgccccatgtatatgaacatgaagaatgcaaatggcccattgtattaattattaaatatacagccaaacactaaagccatttcaattaaaggagagatggaggcaggagggggttggaagcggtgagagagaagaaggaacaattcaaggagaaaacttgtggatgttttatttattccttccttccttcctctctgtctaactttaatggtgatgctgagggttagttgaaaaaaatcttgaaaaacctgaagcagacagtgcaattttattcttggaaaccaaccagccaaacaaacaaaaatctgacaagaaggtagtcatggtttcaccttgacaacaaccatctaggtgatgggaggggagcagtcagttttggtgaagacttgatgttgtcaaacaacttcttttttttgagaatgatttatctgttctattataaagcctataaaatagaaaaccactattgtgattggcaggtggtaggtatttcttaatttttagtttcttaatttcttaaatgtttaaggaataaatgaataaaggaactcttttctgacaatctgtgggcccagtcatttcctgtcagatttctcttgctgtttgccctgttctagtgagtatgatatttggtgaacttgtggaatagctgaattcatacattttattagctccagtaaagtcagtattccagtgaaggcagtgtagttttcaaagcaaaattttattgttgacagcaatttgtgagactgtaagccttagatgattaggggatgttcaagatgcaacttttctttgctaaagtacatttagtaaatgatatggctcagaaaaacaaaaaacaaaaaaaccccaaaaaagcctaaaacaataagactgtatctctatgtgagattaaaggggaatcttatagaaagagtgctacttataaatgcttctagtgatgaggtcaacagaatgtgggaaatgctttgttgtgtaaagtctacagataaacctctgcccatcctgcaaaaggttatatgcatcttcctcctgcaattccagggtctaaagcagtgctgtccaatagaaatgtgaaagtcatatcatgaaattagttttaacaatacattttacttgttgtaaatatgttgtttacatatttagtaatatacctaaaatakcatttaacatgtaagcaatacaaaaattattaatgatgtatgtattttgcattttttttgaattaagcctcagaaacccagtgtgtagtttatttattttatttattgtgtttttttgagagagggtctcgctctgtcacccaggctggagtgcagtggtgcaacctaggctcactgtagccttgaccctctgggctcaagccatcctcccacctcagcctccagagtagctgggaccacaggtgtgtgccaccttgccctgctaatttttgtatttttttgtagagatggggtttcgccatgttgcccaggttggtctcaaactcctggactcaagcaatccgcccaccttgtctttccaaagtcctgggattgcaagtgtgagccactacgcctggcctccagtgtgcagtttatactatagcatatcttaatttagactagccatatttcaagtgcatagtagccacatgtagctagagtatggattctgtaaggacaggctagccaatgtactgtcatagtccatcagtgtgacatgaagcctaggttatatctccttgcttcatgtgatctgtggttcacatgagagttaatttcaaagccctgttctatttagaaagctcgaggtgagatacctcaggctcttgctttattttcatgtgacttaaaaatggcccattgtattaagtattgataaacaacaccaggtgttggcttccgtcttggaaaagtatcttccaaaatgtggtctttccaggtcctttagcaagctgttgtggaactgtacagttccttacatttgccccgatcagacatgaaatttgggcagctatgctgggaaggtccacaaaagtaactgtgagatggtggtccaaaaccttcctctaggaatcagtgtcaaaacatttgtacttctccaacagcttcttaaggtattctcaaagaatatgtaccttgagaaccttgagaacttttactcctttgaaatctagccatttcaaatctagttcagaaaaatgaaagttgaccttttgtcctagggaaaaataatgaagatgatagagcttgaacattcaattaaattaggtagctgtaggtatgtgaggaactatgctcttcagtagtaaagttagtggtgaatgctagtgtaggctgatactctgcttgtaagacctggaagtggcacccatatacagagtctaccttcagtcagctttcttctgtttttttggggggtagctgtccttaccaaacaagatgttgcccaaacaccagtgatcattcatgatgctactgttaagcagttattatttatcagagagaatttgaagttatgtctctagtttgttattttgcttgtccccaagggctttccgctatttaccaaaaggcttgccatggtttgatgatggaagtgtgatgcggtagcagtgtcctgttcttagttgggtttgggggaagaaatgcagagaaatggtgcttcagtggcaacatcggaggttcctcatcactgtggcttacatttattaccccattcaaaattcagcccatgcaatttcaaggagtctccttaaatatctatttggggattaggtggagataaaagttgaaaaatgacttcaaaactgagaaagtactttgactttttttctttgagctattttctagctgccattatctgccccctgccataactcattccttttttgggtgtgaaaaacaaaattatgagaatattttccagaatatcaagctattgtggccttgatcctatacttttaaatgtgaacaaacccaggccacttctttaccattgtcttgatagaagttagagccacatttggcctgcaggcctgatgacagaggcacctgttactgccttgacaacagtcascgcacagggcttccttttgttttttcatcatggcatatggagaaaatgataatatttgctcaacaccctgtgatgatagctcatagctgttggcaagtggcctggggactctggctgctccagtctgcccaggcagctccattctggtcacactggctaggaagctttgttttacagaaataatgatgtgcagatgaacatttcttatttgaaagtcargtagccacaccatgctccttatggcctcattctcatagcttttcagttcatttgttgaacagatattaaatgcctcatgtttgctccatatatttgctaggcccaatgtttctttttctttttttgttttttaggaggctaccagtaatatcatctctccatgtgtagggttaaagcctttgctcttgtcacctggtaccatagaatccatgtattcttgtgcctcattctgcagaagttgccatatttgagtcttgcttcaagcccctacttttatgcttatcaatttagttgtgatacaaaatttctcactgatccatgacaggctgaaatgtggactattttgttcctgagatattcaagcaattcacaggttatcattattgctrtcttcacctaaagggtgctcttttggggaaagaccatttctattctagaaagtgatttcacattattttagccacattacaatgtagcgcatctgggaactgtttgtgaaaaagcatgggttcattctggatgcctgggattgagtctttcttggatcttgggcctcttcgatcaagacttcacattactatcagggtgtaggttttaaaaattaagtctgattatatcattcccctgttttatcatttccccttcatgggctccacactgactaaaggtgtggaggaaatgcagactccttactacagcacagaaggcccttcttgacatgggcttgtccttcctctccacccttgtccttttccactccctccccatacccaaatccacgcagcttacccggtggcggcttctgagcttttgcacatgctcttgctccctcctcctgcctgtcagctcttctttctggtccactgtatttacatggttgactgttaagtccttctcaaccccatggaagctcttctcatgtagccttgtgtggtactctgtttacacatctgtgtctttcctgtatctgcgggtacttttgggcagcaactttgtcttattcttctttgtttgaataagtaacctactagcacagtacactcatagtgggcagtcattatttgtggaatgaaagaactaatgagtaaatgtgtgaataatactaaaaacaggagtatagcacatttcaagatattttatatgatctgttttcagtggaaagtgcctaaaacatgttgattaagaatccattctgattttgcagtaatattccaagggacaaatttaccatggtagacaacttcttcaaatgatgtttcttttatcagcagccaatctatgctgcaagagtgaggttttttttttttgtttctaagtcagttatttacaacacagattgctagatgttttaatctaagaccagttctgtatggaacatcaatttagtttaatatgtgagtggggacctatctccaggttgactctgtcatccttcactgcataagtaaattttcagattgaccaggtggtgtagagtcctaacaattgctctttagcacctaccttgagaaatagtaaagtttgttaggcctcctgtctctcagcaagtcacattgggtcaagagcaggagtcaatattgttgaacactgaagttatgatgcttcaagactttgtttggattagaatttgtacagcaaactaaaatgtaatctggatgctgcttggtctgccttctttacatgttggtggattatggaactggaaataatgggactgccataggactggggtcaagcagtccycagaatgcaagtatgtgggcatgtcctcaccacctggagcagttatggaagtacgcctcctgtggcaatttgaatattggaagaactattagaagaagcattytcctggagctgtctggtagtgttcattacaccactccaaagcctcaagtttaaggaagcaaaattamttcctggccaccgcaactgcaaaagtgaggggacccagtgtttccgtatctgttacacccattgctggttcaaagctcacgttggttaagtctataaaatgttttgagacttaccctgacctaaacaattccccatggcttttttttcttcctctttaatgattgtttggtatcttttccttctttaatctccaaacttcttaagagagcagtctcgactctaattatggtctggcctctactgaaactgttcctgctaacacaagcgttcgtaaaaccaagtggccatgcttgttcttcttcctacttggtttattctatggtcgctctctaattcgcattccttccctgatttataatgtgctgtcttttggatttctcctccctccatggctagccatctttctcagcctccctctcaaatcctttctcttcctttgcccaccctgatttgctggggttcttgaggacctcatgatttctggttatacacactttgtatgattaagtgcatccagttccaagtttcaacaactatgtttgtgctgctgactccaaatcatctttgcgtcttgaacattggagtggcatctgcaaatgtgcactggatttttgcaccctgctgttgtaccagcagaggtgttcactgatctggacttttggaatgggcctccacatgttttccaaccccactgtctccctgctgtagctgatgctagcagaggtgaagcagtcatccacatgggacactcctcttttgctccaccacaccgtctccctcaaaagcaagtctaaattaataatctagagtttgattattatttaaagccagatggcatgtcaacttaaaccaaataattcaaatatttactttgctttaagctcataaagtgcctgtccttacagcatatttgcatttatgtaatacaactatactgtcaacactgttttgttgttttagaagttagggaaatataaagaaggcactttttaaatgaattttaaaatgccactgtggttctaccttattaaatttcaaaatagtctttgtgtcactgtcattcctcttacatacttttagtatcgcatgttcaaagtgtaatgtgactttttctttaatggataaaacgaagatgaaaataacatctacctcatagggttgctatgagaagtaagttgtatagaatacactagtgtttaacacagagtcagtggtatccacatatttgctgccatttttgttactgttatttgtcattcccacctgcctttggactctgtaaaagcatagagaatgctttttattattttatgtttgacaccaagttacagtccttgatatataataaaggctcagcaaatgtctaaatgaatgttgaattgcgcttcaaaactgtttctgcatgttttcctagaaaacacatctgttgatataggaaatcaaccttgtaatcgtcaacctcaaagactatcttttctatcttattgtaggtttgttacagtagtaaaaaggtcaaatagttttcagtgtttggacagaaaaatgtatttgtgaccattactatagagtcacaaatgcatttcttagaaatcataaaaattggccgggtgcagtggctcatgcctgtaatcccagcactttgggaggctgaggtgggtggatcatgaggtcaggagttcgagaccagcctggccaacatggtgaaacccggtctctactaaaaatacaaaaaaattagtcgggcctggtggtgtgtgcctgtaatcccagctacttgggaggctaaagcaggagaattgcttgaacccggaggcagaggttgcagtgagctgagatcgcaccgttgcactccagcctgggcaacagaatgcaactccatctccagataaaaaaaaggaattgtaaaaattcatgttttttagtcaaattatattttgagtgcaccaggagagtgagttattcaaaagaaagctgtgaatcttttgtagattggagaatcctatagcacagtgaataacaacacctaaatgtatcactttcaggaattcagatttttttattttggatttttcttacagtgaagaacatctatagttttttttgcatagtatttggtaggtagtaggctttagatcagaagtggtaatatcatactcttgcctcatccttgcttaggtatttgtttacaaaatgtggtagggttggaaagtaccttaagttcctgtctgatctagatttctttgaagtgtatgtgtgtgtttaattagaaaaaccaacttgggtcatataaagtattttattattgataaacattgacatttgtataattcactatgaataaaggcacaaatattaactttggaagactaccaaagtaagcgtatattatattaggtcagttaaaagctgtaacttccttattaattttttctcagatttaggtctaagacctaaatctttttgtttattccatcagccttatcctggctgctgaatataacccaatattatctactatttatctttttgggtaggaggatttgcaaacatattcttttggttctgtgaatgaatgtatcttagggatccccttgcctctctccatatgattaattataaaaggttgctatttaaccaaatggatttctgtaatccaaataagcagatattgcagagcgtatttatctaacctacttggtggtcaaggatacagaaatagtgaccgtagaaacctgttttcttttattgttcataaagaattggttttagtctcttgatgattagtgcatacctttattcttggattttcaaatactgtgttaagcttaataattacttgagagatattggataattaatttgagacttttatttaaacaagcaaattttaattgccataattagattctttatttaagttgttataaatagaagctatgcttgaggtttaatttcacatgtgcaatcataacactcagggtttcttagattttacttagggcattttggatattttttttatttcctttgagacagagtctcactctgtggcccaagctggagtgcaatggtgcaaactcggctcactgcaaccttcatcgctggggctcaagcagttctcctgcctcagcctcccaagtagctgggactacaggcacacaccaccacacctggttaatttttttgtatttttagtagagacggggtttcaccatgttgccctgggtggtcttgcactcctgagctcaggtgattcacctgcattggcctcccaaagtgctgggattacaggcgcgagccgccacgcccagctggagatattatgtttattacaactagattaaatgcagttcagatgtttataagatggtatgcacagtttcacatataactttttataactgggaaaaaaatctgcattaaaaaatgacaattatattttatagccaagttttgattttcatggaaatgataatgggtaatataagtaattaaagtaatggctccagtttttttttgatggccatattccaatttgtttaacaaatatttattgtgttcttatggtagagtacagagtctatattgggtcagttttctactgttgaggtccttgccatataatggggggagaaagctttttatatggatggtaacggatggcccagtgaagagaacaacattgcttccctgccctgaggatggagacaaggagggcaagggtaggggtaggtggggagggggtggtggtggtaaagacagcgtaagtgaagaggtgatatatatattttgtgatgcattgcacaaatgccttctaatgactgcaaaatttggggtaaccttactcgtgccccagtgtcccatggttcggaggcacatggggaagggaagaaaatgggggagatgatggagccatgggaatgtgcttggctactttcttggtcttcttaagccttttctgaggatctcttagcgtgtttagactagaggctgataactggtgctcaaagtcagccaatgggcatgttttatttggtttcacaggagttaaaaacctaatttaaaaagtcaacattttaaaaagagagttttcacatgaaaattcagttggaagatcagctgtgttcagttggctttcctacaaggtgtctcattagctggagtggaggagcacctgactctatgtatgtcccttgcttgaatcttgttatcctccagagtacagcttggctgactctggtttgtggaatggatgcgccaatatcactcgctcctgccttttgccatttccccctctaaaaatcagcattgacaagagataacagccctataaaaagagaaaaaaaattggaagtgtattcatcaggagcttgatatttacagatgttttttcattgtttaaaatatgtttactacattcatggaaagttttcatatttcccattttctcttatttatcgccaagacaagcaatgtttgtttccatttcatttctttgcagtggccaggaaacaaacattttatgcaaaatacctctgccgtaaataaaagtttctaaacatttcatacagtctagacacaagtttttctaaagcggattgaattcctaaatagcattttgagaatcaggtgcatgtttttattttaagctatgtttgtctacatgtatgtctaattagtactaagagtgaaaagcagttttatttgtaagggtttcctaaattgtataagaattataaaatatttttcttctcttttcttacaaaattctgccagcgagttgaaaatggtgacttcaactgkattgttccaggaaaatttttagcatttagtggaccacatcctaaaagcaaaattgagaatggtaggtttttttttcctttaccatccaaacatttattttgatttatctttctaagtttcttaacttcctcagataattattttctttggtaatattctccaaagaatatttattcataatttaaaaaattgaacagtagtaatagtgtgttaaatattgtatttccagtaggtggagctataatcactgttttagaacttaacaaatttttagcttgccataaataggatgttcactttacctgacccccaattattagagaagaatctgagaaacaaactggtcaaactcataagcagattgctgtattctttcagtggttctcagatttatttgttggtagagtgctacacatcaagatgttctttgggtaacaccatgttgaataatgatgatgaagacaatctgtcatttactgaatacttaggtgctagttacacagatcacagcatttatctcttttaacactcaacacaactctatgagatacagatattgttatctgcattttagggaggagtaaattgagccttattagtagagaatttgcccaaggtcacaaagtaataggcagaactggtactccaaaccagaggagggctcctaaacattgccactacactgatacacttagttccattgtgacaactaggtacaattttctagctgacagtggttaaactacttatttgcagcataatttattgccatgggcatacatatttaggaaaaaaataaaaacaaaactaaaaataaaccttttgaatgaaacatgatcagctatgcaagttttcccattaagacttattttgtacttactaattttttctatctactaatattccctagaaaacaagtaatgatagacaacagaggttcaagaataatttacaagagaagtacataaaattgaaaaaatatccatgaacaaaatatccccccccctttttttttctatctgatcatagaggtggaataccagtgttctgagggaacctaacttgaaacctctggtctagatttattcttcagctgggcatggtggcatgtgcctgcaatcccagcactttggaaggctgaggtgggaggattgcttaaggccagaagttcaagaccagcctcggcaacatagcaaaaccctgtctcttaaaaaaaaaaaaagatttatttttctttaatcatcatattctagaatctagtttcattgtatattgttattcatgcatttaggttttataatttgagctttcataaatatgcttatcatttcatacctgtgacatatttaatagggaactctgcttgaatcatgattttaccatgcgaatgggcaatccaggtctagagagttaagctcacaaacaggatacctctatggtgaagtcagaatttgatcttcttacttataagcttgctaaataatcttttttggtctggacattcaataattaacctctgtcattttgggttgttaggaattacatgttgagagcctgaggaaactgctttctgacaattggcctttcaagataagactgattaaacctgctttctgtgcaaattatctgactcaggcccaggaaatgttagtagggatattgtttcagtagtagttttgttgttgggtatttggcaaagtcgaaagactttcaccatttgtgattcatgtgtttgactacgttttcttaatgagaaattgagagatataattgtaaaagccatttaaaagtttttatgtatatagacattgtatattctatggatacatgcattttgaaaaaaatttttttttaacaaaagtggcatcataacatagttaatatcttacagccaggtttcttcacttaacatatcacgacttctttttatagcagtaaatgaagatccatgtaatcattttccacgactgcattgcattttgttctaccatatgactgtgccatattgtgttaatttatttttggtttttgcttttgtttatttagagacaggctcttgctttgttgcccaagctggagtgcaatggtgtgatcatagctcattgcaaccttgaactcctgtcctcaaatgatcttcctgcctcagcctcccaagtagctgggactacaaggcacagcccaccacacctggctggtttttttttttttttttaatttttagtagagatgaggtctctatgttgcccgggctggtcttgaactgctgggctcatgtgatcctcctgcctcccaaagcactaggattacagatttaagccactgagcccagcctgttaatttatttttggatgagatctaagttgtttatctcttattcttactctttttttcctttttaaatttcatcatctatttaaccagatgaagtttttcactttttaaaaactgctgtggttggcataaatgttcatacatctttttgcagctgtagtttcttctctaaattgttagaaatagaatcactagataaaaggatacgcaattttgtataataagttataagtgtcaaaaatatttaaaacaatttttggtcctatatttaatatggggaaaaaattatagccaccattcgcttacctgccaggaagggtgctaagcctcttgcatatacatcatctatttaatgatcagaacaaccctctggagcaggtggtatttattttatagaagagaagctggaggcttacaggaattacctaacttgtccaggttcataggccagtaattgttggcgtgtggattcaaacattggtctgtttaattctgaattttgtgttgttttaaattttattatagaggatgtacatgctcactctagaaaatttaagtaatataaagagtaaaactctttaaaaacatcatataatcaagaaataatcactttaagatatcgctctatatgcatattttattctatgcatgtattgtgccctgtcatattgacataaaaaaatctgaaagtacatttatctcacctttgtcagcttttatgatgcctagaacaatttcatttaaggctgccattggtaaaatattgctattttactggaatttccattttaagatctaatattcactagaagcttcactatacttttttgtaaagtactttaactttgtaaatgctttttgaagttgagaaaataattttgtgatggaattaataaacctgatccaattacagtgacgtcttggtaatttttttttttttttgaattgagaaacctgtgtttttctgaggaggctgaaagtcattttagaggctcgttagaaaagctgaggttttaaagaagtgatcaagtagctgttgctaggaggtagctaaaggaagctctaaaatcttgggatctgggcagaatgtattataagagccttaagtgtgtgtttgtgtcaatagggaacactaggagtttcttttagccattttgattcacattgttttgacagtggggaagagaagagccctacttttttttgttaaacatttttgaattgataaatgatggataacagcagaatgaaacagatattttggatttcagattttctgtaaaaatgtctcttaagtgtcactgtcattctcacttctatttaaacacacacacacacgcacacacacacacacacacacacacacasagagagagagagagagaaagatagcttcagactgagaatcccgaccatttgaggcatcagcctgctcctttaatgagagaagcccagtgtcccgtttagtaaagagcctgggcaggttgaagcctggctccattcctttttggctgcgtgaacttcagtgagttccacagcttctctgagcatcagttttcctatatatcacagtgggagaaatatgatcctcactgcaggcacctagtgaggattagagatgttatgtgaagtgccttgcagagtattgggcacacataataggcgtttattagatagcaggtattatggttacatttttatcattagctggcctaatcaacagattttatgtctttctacatttgcctgctcagtttgcagtttttacttttaataatgactgagtgaactagtcatttgactctgctgttcttcagttttcgaactttaaaatgagggcctgggaagagatgaataaaaacatctcttttgactctgataccgtgttcatgtgtttggtcagcttaactccaggactttgttgtggttcagtgatgccagcgcaccatcttgtggccagatggagtaagggtcggatgaaggctccataagttctgggtcggcacattatacacattgctaaaaccaatctctcgcaaaaagcactcacgtacatccgtaaaagccacaaacagttgttcacaggtcataggacatttccattgttcgttataatttattctaaacagttttaaggatttttataaaacctactcaccaattctaaccgctcatgttcatatcatgttctcttatttggagtcttaacagatagaatcaagttgaatcttacttgaaattagccccagcatgggtgttggaatctgactgccaggattgaaatactggctctacctcttactagctgtatgtgtaygggccagcttttccaggcaccagaaattgagtaattgtaggttttaatgagataatccacataaagcacttagcatagtggctagcatatagtaagtgcttgataaacgttaggtgcaattattgttgttattattatttcagtgccctgttgccatatttggacaatttctgtcsagtgttttcttctcaaaagatgtatacatcgtttctcttaatagtctatttaggcatgttagctatgctgccatttactcatgatggaaattcatatatgaaaagagagattcttgcagcctttgttgcagggaggaaggggataggcactgaaccaattgctaacacaacgtgtgacaggwgctgtcatggaggtcccaggcatgctagcaacccagaggcagaagctctcaccagcccrccacaccagggcaggctgcccaggtgtttatgagcccttctcctccccattcctcacatgatagaaaaaccgttacttcttaatgccaactacagttctttttttgctttaggctataaatctgttgcagggaaataatttgagcaagtaaaccaactaggaaaacagacttgatttttgcagttagaaaagcatgttttctccatgtttgtgtaggttattgtttctacacagaagattttaaataagctctgttttacctgtttgctcaaaagcaacatagcctgtgaaaatcacatatctgagctgtggattaattggtcctgccttccaattctgtcttcatcctttgtgtgacctggccaagtgtaccagttatggctgtccaactctggtaaaaggcagtttttggaatatgttgggtagctcatagactttaagaaaaggctggagaactaggcttagaagatgaacaggacccaagtgggaaaatgggaaccacactaggcatttcaaacataaagcatttaatacaaggagtttatttcaaagaagactaaaaagtaaaaaggcaacactgaagaaaccagaatatgttggagaaaacagctagtacctttaaggctggggggacaaaagggacaaaagtggagttagcagaacctgctcctgttttctgctgctgaagtgatgctgccaggaggacaggaagaattcccttcctcctcctcaggttgaggtttagtgcctcccatttttacaaccaataggaagccagatagaaaggtagtctgggaaatgtagggcgtagtatatggactccagccccagtgtcacagagcataagagtcggcttggagctgagagctgactagcataacagggatccaaggcagcaagaaatacagccaagcacacagcgtggaaacagtctggttcactttgctggctgccgccacccctggaacctcccatcatgaatgggttccaactgagataattgcactcagctggtatgttagggttcagtgaattctgaatgggttacagatgtggccatcagtgtgctgggaacttagtcccctgaacttttggagctgccattgcaaggcctgcaaaggccaaagcccccagtggttgccttggctgattagctaaggctaggtctgtaacccagctgactgtgtagctcccaggaatactcacatgatggtggagccactcaaaaataaaaggggatttaaaggtggagcatcttcctccctcaaaaaaaggaagtgtccacaaaagttattgtttatttttaactaaaaaaatttatattttaattgataaaaattatatatttatggtgtacaacaacttttgaaatatgtatacatcgtagaatggttaagtcaagtcttacttaagtattcacatatttatcattttttgtggtgagaagacttaaattttactttctaaatgactttaaagtatataatacattgttattatagtcactatgttgtacaatagatctctgggacatactcctttctaactgaaattttgttttctttgaccaatatcctcccaacaccccctcttttagtttcttaatctgttaaatggaattagccatacttaagagatggttttgagaatttgaaatgatacgcaattgtgacttgtacatagtaggtgcttaataataattgcttctggggagcattgtactacaaattaaaactatacatatggcaaaaaagcttcagctgtagttgaaaactgtttgtcaagtagagaataaagctcaagagagaataaagtcaccattctaggtctgttatgcacatttgattacttcaagaatgcttttgtcttgggagtgggaagagtatgctcccaggattcgaatctagaggttgagattttgaactttaatgatgtattttcagtacttacagaagttttctttttaacctcctgtggtgcttacagttatgcagattgatgcttgtaggagcttgctgtgacctcttctctcacacaacacactttcctcccaagctttgttgagatttatacacttcattgttgagagttttgtatttctgggttgtggaagatgaaatgcatgccttttgcttactgctcctttgttcctttaggttatcctcttcacgcccctgaagcctactttccttatttcaaaaagcataatgtgactgcagttgtgaggctaaacaaaaagatttatgaggcaaagcgcttcacagacgctggcttcgagcactatgacctcttcttcatagatggcagcacacccagtgacaacatcgtgcgaaggttcctgaacatctgtgagaacaccgaaggggccatcgccgttcactgcaaaggtgtgtgcaaggcctcggtggtggtggctgtgcttatcgaaggggcgggccaaggaagagcaaataacataaaacaaaacctgtttagtgtcttagaaaaacaatgaggttttaaatttcagacaactgggacacaaactcattttaataaccccttcttaaagaaacgattgcttgggtgtggacaattggtggtggtgtggctttcttgatatgccagtttttcagaccttacctttccaggcccacgtgccacaatgaggggaaacacagtagcagtgtctttaggctgcaggaacacctttaaacaggtaaaattctcaagagacaagggttgttagttttcctctctcctttgttttttttcagaattgcccatctcttctccatcctcttgcactgtcgtggttctgttttatgacccagttatctggacccccattccagtctctgcttttccctcccctcctagtctttggcttcatggagcagagcgtcttccatgcctgttgctaggggcaatccgctagcttacaatgctgctgatgtgatgctgcctcatggaataaacttaaagagtttgttttgcaaaaatctctgatctctgggggtggatactttggggcaggaattgttcagactatagaaggtttaggattgccagatttagcaaataaaaatacaggctgcctaattaaatttgaaasttagataaacaatgaatacttttaaaacaaaaagtataaatatgtcccaaatattgcagggaacatgcattctgtattttatctggcaaccccatgtcagctactcagaaaatatgacatgccatttgctctaagcttgtttgacttcgaggaggcttaaaatccactccattccagatctttcggtatggataatactggaaatattccagatattttactgggtctttgatttcagcgaggagaaatcactagggccgccctgggctggagcctcgagttcctcatgtgcagctcctcctagtgtcrctgggtggtgctgtgcttatggttttgggtctagacccggtttccctctcattttatgctaatcatctagtaggtgttggggagggtgctgttcttttcatgtgcctagtgctgctgtaactgacttattcagacgagtatggctttggttctgacagaaattaaaatgccgttttgtaggcccttgtttctatgtttaagatttgagtaggtggaggtactttgtgaacatgtgagcaaaaatgggaagctgcggtttcccagagacccagagagatggaaatgagcagcacgtggcctgggtttggagcagggctccccatgccaggctccctcctcctgggtgggcagagctctccctccccaccctccccattagctagcaggatgggccctggctttgtgggatatcttgtctctggcgtggagtctgttaggaaggtgtcacttgctggctcatttgtgggtgctgctttcaggccacagtggggtgccagtgtgttggcttgtccccatgtgattcatttgcaccctgtttgcttttccattgcattttgttcagtattgcccaggtccaagaaaaagcccacatgtcacgtattttaaacagcaatagaacttgagagctaatgggaacgtttatatcaacgtttagcaggagataatcctatcttctctttcaaactttagttttgtgccataaaaattgtattttttcctgagattaatttggccttatttcttagttcaagtagttttattattactacgtcgtagagtttatctgtggattagccatccgtatcttggattgacacattcaaaggagaagaactgcaaagctttcattaaaactcagtgtgtttcttgatagtatttctcacctgagagaccttgtgcaaagaaaactctctggtgttaaacattcttattacagatattttctctatatccttgacctgtgaatgtttaccttttaaaaaatatatgtatttattttatattgcaaatttcttttcttttcttttctttttttttttttttgagacaaagagtctcgctctgtcacccaggctggagtgcaatggtgcgatctcagctcactgcagcctctgcctcccaggttcaatcaattctcctgcctcagcctcccaagtatctggaattacaggtgcccaccaccactcctggctaattttttatatttttagtagagatggggttctgctggccagaactggtcttgaactcctaacctcaggagaatgttggccaggctggtcttgaactcctgacctcaggtcatccacctgcctcagcctcccaaagtgcggggattacaggtgtgagccaccgtacccagtctgtattgtagatgtttttattttaaatcagaacctttaacattgaagtcagttcttgtataggatagtcacatttacatgtggtaatatctttttgagattgttatttcattttcttccacttgcacacacacgtaggattcttttataaggattacacctttggtttaattacagctgtattgcttttcacagcatacttatctactataggcttattaattattttgacatctgccctaattaagtcagcttmgttttctgggaattcaagcagcactcagtcttttaattgaactaaaagaaggaaggagaaagaatcttatcctatgtcaaatgaactttggtggctactgaaaagggaatgaatatgtcatgcctcaacgtaaagtattttatacagagataaactagaaaccaatttgctggggattacatttcaatatctgcatttcactttgtggttgataaaagagatggctatgaattcttgaaattctctaccacaaataataatctaaaatacagcaacgttgtgatagtccagtatgtgattatcgatgttctatagggctttcagaaaatgcctggaactataaagcaattggtgtttgacttggtataaatagaacacttttcaacatcttgtcatgctgtgccagggagccctttaattacaaatgcttaaaaaattttgttaaagtttttatagaaacttagtgaaatgttcctattcagttcagttgtggtaagagctcctaactattgagtgctaagtgcgttctttttatagatcaaaattatagactcttttttaaaagggggaagctgctttagtttcagagaaattggaaaatttcctgcacctcctttttggttgtgagtgtgaacaggagcctaagtgagggagccatccaggtctttgcacagtggggagcagtgagagagagtgttgtctccataaggaaggcccttttctctccagatagacacccaaattggtgacttgaaggaagaactctggaaactcactgggctctggcttctgctccaggatgtcacctgtgttttatctatacggttgcctatagtcttgccaggcatctagggaattaacaacgataggcactgggtgaaatagaaggcaaattacgcagaaatcttaatcataaagggagagccccactgagaccaaaattaaacctcactcttcgaaagaacattgatgtttgatctggggcaagggttccttcagattaaaacagaacacacacacacacctcatctaatgaaacagagtatgaatacttcttaaaaaggaagggttagccgggagtggtggcccacgcctgtaatcctagcactttgggaggccgaggagggcagatcacctgaggtcaggacttcgagaccagactgaccaacatggagaaaccctgtctctactaaaaatacaaaattagccgggcatggtggtgcatgcctgtaatcccagctactcgggaggctaaggcaggagaatcgcttgaacctgggaggtggaggttgtggtgagccgagatcgcactattgcattccagcctgggcaacagcagcaaaactcggtctccaaaaaaaaaaaaaaaaaaagaagggttaatgggaaggaaatgtcaggcatctgtagacacaaaattgttgttttagtgsgatgaaaaactttttttttttgtataaagcacagatttacataaacagatatgcagtctatctgtgacagtgaaatttcatggggactgattaggaataaaatatctaaagaggctcctggaaggaacaataatgtaaaaaaggttgaggaacactgatttaaagacatacatttttcatattttaacatttctgaagttagaatggatcttaaaattgatggcatgtcatagtttaattttttctttcttagtggaacttacatactacacgactgtagttttagatttgctgaaatgctgtgtgctcccaattactgggagataagagaagactacctttattgtttgatcagggaaagctgacaaaaggtcccctcaaaagcagaagattcttgaacatgtaaaaaatgaaactatcaatgtttccctactttgttttgttttacacacgcgcgcacacacacacacgcatatgcacacaattttttttctttctttttctaactaaatgttttcatggatgaagtcaacattgtaccagttttctaggtcagaaatgtcacttacctataactttccctgtgacccagtcctaatggatttctaattgagctttacatctttgttgcagttgctcaccctcatccctttccaccctcatcccaaccccccagccacccttgcttccctgccccagccttccatctcatctctcttgcttccatctctggcttttccactccagccagtaatgctgctgccagacccatttgctttttatcacatcactttcttgcccccaaatctatggcaccttcattttgcccttttcattgtttaaagaaaaattgggttttacatgatagcagttatgtttaytagctgttgataatatcatcacacttgaatgcagagcagtttctgggcaaggtttgatttcagtgtttttgtggtagcatttgctagactttatatttcttattctgtttcattctcttacagctggtcttggaagaacagggacattgatagcctgttatgtaatgaaacactacaggtttacacaygctgaaataattgcttggattagaatatgccggccaggctctattataggaccccagcagcacttcctggaagagtaagtatattgtccccattaycacattatatcctgttcttgatcctttctacctcttgttmccctggttgtggaccatgtcagcctgtggttataaaatggctgcattgttaagagaagtgtgtgcctctaatagaatattgttgatttgacagctaatgcattctaactttgtaccttttatatctcttagatcaggtgagagtgagaagaaaatcacagagccatctctgcctaccctttttctgtcattttctatgtgtgatctggctacagtgcaattttcttatgacatcccacttggcacttttcattcttttcttttgtttgcatgtcttaaagcataatgagaaaaaaaaaaccacaattaaggtcactcagtgattttggtaagattgctgctctcctgacaactaactaactaaactgctaatgtaggtacaacttatgaatatacccaagaagttaccacagaagaaaaaaggaggagaactgagttttagttctggctctccactaactagctttatgaccattatttagaagaatacttatgtattcactcattcatttattcccacagccattcattcattaactttttgtccagcctcagcccaagagagagagatttaacctgtaggacacaatcctttcttcttagaatgttagaaygtatctcaatgtactcattaataaaacaagaagatgaagttagtactggttgatctaagtccagctctaaaatactatctattagtgatatcttttactgaaatttcatttttttttctttttatgctgggttgactctattttattttaattttaattttttattttttgtagagacgggggcctcactatgttgcccaggctggttttgaactcctgggctcaagcaatcctcccaccttgacttcccaaagtgcagggattacgggtgtgagccactatgcctggctgatggctctcttttgaatagcattcttttccatataattatttatttccaatttaaatataattattcctttccagttttaatgatcatgatcatgtgtgaattcgtaaaraaaygatcatgaatttcataggaagatgccataagtaaactcttagcatctgaaatgattaagaggatttgagcctgctgaggrattacttactttagttgccagtcctagaggtaataactgattaagaagtgctgaaaaatgagtggttatactttagcttaaaagaatgatgcagatgtctaatgaatgcattagaaaaaatatccaaggacaggatcattacaaagacaggratttctctctttttacccgtgaggtacaaataagataattctgttattttggagctttattcttgatcagattctcattgtcttcctctatttctctgttttgcattttatgtgcctgtagcctggagctttgtgccatgtatctgccaggttctcattatactaattgctgaagttgaagaaatggtcttagggttaaaaaaccaaatactcytaagcytagttctttaagccatttaatcaatgtcttaaaattattgcttgtcatttaataggtattgctatacctattgccccaggcattctgctaagtacagctcgcaaggtgaggagatatagcagagaattctaccagtcaaggtcacctagctttctcagggtgtcagataacacagccctcatgtttcatggctgcatactccctccaacctccctattatactctttctctctgccatatctcaaaatagtaagagaagaaattagagttatgaggcaaaggcactctaggctgaagaaaggcttttaaatttatagatacttaagctgtatataaagaactctcaaaactcaagaaaacaacttaatataaaatgagtaaatgatttgaacagaaagtcctccaaaatgatatacagatggtgaatattcctcatgatcataaacacagagttcttaaagaaacattgcatatcaaatccagctgtataaaaaagatagtgcatcatgaccatcatggctcaatattagaaaatcaatataattcaccaaattaacacaaaaagtagaaaaattatatgattatcccaatagatgtacaaaaatttgacaaagtttagtacccatttttaatagaaactttcaataaactagaaatagaaggaaatttcctcattcagataaaaataatctatgaaaactctatagctaaaattatatttaatggtgatgcttttcctgtaagatcaggaacaaaacaagggtgtctactctcactacttctaatattatactggaaatcttaaccagtgcaatgaaaaaaaaagaaagaaaaaaaaacttagaactaaagagtgaaattagtaagattgcaggatacaaagtcagttttcagaaattttagcaaaattttaaaattctgctaattaaaagacacacagtatatatatctgacaaaagacttgtacacatatattaaaaagtataaataagcaattttaaaaattaatttttgaatgggcaaaagccttggccagatatctcatagaaggtaatatatgtatatgaaaagatgtccaacatcattagccatcagggaaatagaaattgaaaccacaatgagatactattttatgtcaaccaaaatggcaaacaaaaaagaagttttactacaaaatgctggcaaagatatggagcaactggaactctcatgtgttaaccaattggtgtataattgtttggccatttctcataacgttaatctatatttaactctatgacccaatgatttcatttctaggtatttaaataagggaaatggaaacatttgtctacaaagacttgtacaagaatattcacagttgctttattcatagtagcccaaaattagaaatcatccaaatgtccgtcaacaatttatgagtgaatatatcataatatgttcataaaatgaaatactagccagcaataacaaagaatgaattactgatatactcaacatagatgaatatcatattattgtaagaggaaaaaaaaagccagacacaaaataatacatgctgtatagataaagcccaagaacaagcaaaaccattctgtggtgatagaaatcagaaagcaattgcttctgaggtgtgtcagggaaaactgaccccccaaaaaagcatgacagaactttctagagtgttggaaatgttctgtatcttatcttgggttgtgtttacacaggagcacaatcagttgtaattccatatactagccttaaacaattagaaaataaaacctaaaaaattataccatttacaatgtatctggtaacttcaggttagagatgtgcaatatctctacacagaaaaccgaagaattttttttattgagagaaattaaagaagatataaataagtgaaaagataaagattatcttgaataagatcaaagctggaggatttacactcccagatatggattcattttaaaactgcagcaattatgatattgagatattggtgtcaagacagacaaattaaccaatagaatagaatataaagtgcagaaacaaattcaaaaatatacagacacttgatttatgataaaggtgacatgttagagcaacaggaaaaggtctttttagtaaattctgctgggtcaactggatatctatatggggaaaaagaagaaccttggctcctatctcacaacctattttttaaaggaattcctgatgagttgttgattcaaatgtgacagaaaaatcagtgaagcttctggaagataacataaaataatgtattcatactttgaagttaacaaagatatcttaagtggtacatggaaagcattacctataactgagttgaaattgtaaaattctcttcatcaaagacactattaagagagtgaaaatgaaaaccacaagagtaggagaatatttacatcacataataatgggcactgtacttgtacccagaatacttacactcctacacattaacaataaaaagacaatctgataaaaaatgtgtaagaaacatgaaaagacatttcatagaagagaatgtacaaatggccaataaacatacgaaaagcgattcaccctcattagctatttcttatcttttggtacagctatctgttggagatatacctgtgagtggaacagttgggtatgtgtgcattcagagttagaattattaaacagttttccaaagtagatatgcctgtttatgttctcatcagcaatggtttgtcagtctcttaaatttaagccattagattttttaagtgataacttgctttatagttttaatttgctttttcttgatgactaaggtcaatctttgtatattctagatactagtcctttgtctggtaaatgtttttcaaggtttttttcagtctataacttgtcttttcatcctcttaatagggtcttttacagaataaaagttttaaattttgatgaaatcccttttatcacttttttctttttgatattgtctgagactcttagtttagccctagactcaatgatttctcatatttttttttctaaaaagtttatagttttacattcacatttaagtctgtgatggattttgaggtttttgtttatttcataacgtgtgagacttaggtcaagcttctttttttttggcctatgcatgcccagttgcttcagtaccattttcgttgaaaattcagtttctccactgaattttttctatagcagcatcaaaaatcatttggatatatttgtgttgatctatttctttgttctctattctgttccattgacctatgtgtctccttccttcaatgccacactctcttgattactggacctatatagtgagccttaatattggaagagtgattccttccactttctccttgtttaacaaaatattcttagcaattccactttcttttccttttcatatacattttagagtaagcctgtctaaatctacagataatgtttctgggattttaataggaagtatgttaatcctctatatcgatttggggagaattgacatctttactattgttgagtcttctaatccataaacatgatatgtcttttcatttatttagatcttctttgatttctttcatcagcattgtgtagttttctggatgcaagtccttttttgttaaatttacacctaagtacttatttttttttagcaattataaatggtatttatgtccatatgttcattgctggtatgtagaaatacaattgatttatctttttctttctttctttttttttgagacggtgtttcactctttttgcccaagctggagtccaatggcacgatcttggcttactgcagcctctgcctcctgggttcaagtgattctcctgcctcagcctcccaagtagctgggattacaggcgtgtgccaccacgcccggctaattttytgtatttttagtagagatggggttttaccatgttggccaggctggtcttgaactcctgacctcaggttatcctcccacctcggcctcccaaagtgctgggattacaggtgtgagccaccctgcctggccacaattgatttttctgtttattttgtatcccgaaacctaggagttttatatgggagtgtgtgtgtgtgtatgtatgtgcaaattcttggggattgctttttcatccacaaataggacaattttattttctttctaatctatataccttgtgtttccttttcttcccttgttggacaggctaaaacttccagcgctgtgatgagtaagagtgataagagcagacatccttgtcgtgctcccagtcttggaaggaaagcatccaggcattcacctggattaagtatgttaattgaggttttctatagatgttctttatcaggtcgaggcggttcccctctatttctgtgtttctgagggttcttatcatgaatgagtgttgaatcttgtcaaatacttttttggcattgattgatatgatcacatgattttcttcttaagattgttaatatggtagattgcatcgattgttttttgtatattgaagaaggcttatgtccctggaataaacaccatttggtcatggtgtgtaattcyttttatatattgctgaactctgttagttaaaaatttttatgtccatattcataagtaacattggtttgtagttttcttttttttgtctgttttgtctgggttttgtgtcaggataatactagtttcatgaaatgaattgggaattgttcttctctgtttcctggaagrgattgtgagagctggtgtgaattcttaaaatgcttggtagaattctccagtgaaattatctgggcctggggatttctttttaaaattatgaattcaatttccttaatagatataaggctatttgaataatccatttcatattgggtgaattatggtagtttgttttttgaggaattagtccgtttcatctaaattgtcaaaattatgtttgtggagtgtgtttttttttttttaaagtattcctttatgtttgcagagcctgtagtgattttcttggcttcatttctgatgttagtaatttgtgtatttttttttccctttgtcagtctccctagaagttggacaattttattgatattttcaaagaatcagctctttgtttcattaattttctccttatatttttgtttttaatttcattggttcatgtttttatatttattatttccttctgcttccttgtagttttcagtattttggcaatgtgtctaggtgtggatttcattggaattatccttttttgaggtttactcagcttcttgaatgtttaggtttatgtcttgtcaaatttggaaggttttcagctattatttacttaagtgctttctcaaccctgtcctctttttcctttccttctggaactctgttgacatgagtgttaggtttttgttatagtcccacagctctctgggactctcttcatcattttatttttagtttattttctcttagttattcagattgggtagtttctactattctatcttcccctttacaaattctctcatctctccattctgccatttaacccactcactgaattttacattttggttatatgctattctaaactttctgtttggttttctttatatctatttctttgctgaaacttcctattttgtcagttgtttcatgtgtctttgtaattgtttgttggggcatttttatcatggctacttttaaatctttgtcaaattattctaacatctctgtcatcttggtgttggcatttagcgatcatctcttttcattcagtcaatgtcaatgtgagaaaatgttaacctggacattttcctagtatgttgagactctggatcttactaaaacattctgttgtatctggcttcttacactgcttcagcagaggaaggtggtggcagctgggttggggggcagggggttgccacattgctactaccaggtggaggcaggaatctggattctgtactcagcctctgttgatgtccaaggctgaggggcttcttgttgctggtgggtggaggtgggagttctagttttccatcgggtctgcactgacactgtgataggggtcaccttgttactgaagggtgttggtgaaagtcttcactctccactaggcctcctgtgacaccactccagctgacagaggagggttgctggtcactgcctggttgaggtggacttccaggttccaccattactaccttagtgaggagtggggccgaaattgggggatctcattatctgactcccaacttagccttctttgacacttctgtggcgagggattgacaaagggtaaaggggtgcctacctatagcctggcagcgtggaaatccaggatcccctctcagtctttgctggctggcagggttagggccacagtttatttcctgtggggtttggctggagaagagcagttgttgaaatgttttgttgtctactaggatacccttttcctgttcctttgactagacagagcaggcttttcttcgggctttaaaaatatcagctctgggctgggcacggtggctcatgcctataatcccagcattttaggaggccgaggcgggcagatcgcatgaggtcaagagtttgagaccagcctgatcaatgtggtgaaaccccgtctctactaaaaatacaaaaatcagctgggcatggtggcatgtgcctgtaatcccagctacttcggaggctgaagcaatcaattgaaccttggaggcagaggttgcagtgagccgagattgtgccattgcactccagcctgggcgacacagcaggactctgttgaaaaaaaaatcagctctattggcatttttgaatcatatcttcttcagccctaagactaggctatataaggcaaaaggaaaactcgaggaactcaccaccatttcgttacttaggtctcaaggttccaaccaatctgcctttttcttttctatttttcagagtcttgttttttttttttaaatatatataggattttaaattttacttatgggaagaatagggaaaagtacatctactttattttccagaaatggtgttattgccttatattttaaggtaattagtctgcctataattttcggcatgaaatctgctgtggcagtctgaataatgtctccccaaatacaggcatattttaatccctgtgaaccagctgtgaatgttactgtatatggaaaaagggactttgcagaagtgattaagttaaggaagttgatgtggggagattatcccggattgtttgggtgggcccaattaatcacagtgtccttagaagagggacccagggggagccatttagaggagaagccgatgtgatgactgaaacagattggactgatgcattttaaagatggagtaaggagccataagccaaggaatatgggcagccactgtaaattgaaaaaggcaaggaaacaaattatctcctcaaagcctccatatggaaccagctctgcctactgtcactgctttagctcagtgaaactgatttcagacttccaactccagatctgtaagaaagtaaactggtgttcttttaaaccaccacatttacggtaatgctttacaatatccataggaaattaatacatctgctttgtatagatagcaaatatgtacagcaggagatgcagatcctagtgatgaacatgcatattctgaacttctcttattcatcatactttctaatttggagtatttaattccaaatactccaaattagaaagtatgatgaataagagcatatagaggagtcgtgtgacttaagtgttatttaaggaagcttgagttgcaacaatgtgtaagatgaattgggtggatggagattggaatcagagaggctaaaaaggaggctattatcatccatctcagagagacraggacttatcaaaagaggatagaagttggactgaagatttagagatgggtaccagggacatttcaagaaaaaagaaaaaaacaaggctttgaagactaactaatgatcagagagatgaagagtatgaagtcaatgatgacgcaaaagcatgaataagtaacgtgttcattaagcaagaaataagagggtaaaaacgttttctgttaggttttcacctgtcaaaaatgactgaacaagttaaagtgattgtattcttttaaaggtgaaaagtcaatcagtgctttttagagaatgttaattccaaatctctgactttagaaaggctggtttgtcatatcctcctagtccttgaggaccaaaatatgtccaggtgcttgattgccatgtcttaaacaagcagccctcttattcactggcagtaagagagatgtttattagcatccttttgagttgttgatgaatttacttattggctgacctctcctttgttacagtctgaaattttatatttaaacttttaaaggatataaagctctctatttgcaaaacaaccatcaggtgtttttcttctatttaaagctgaagttcttaaaccaaaaataccattctgaatcccaaatgtgtcttctatcaaacatcctcaaggttcttaaaatgatgtaaaaatacatctttttgtttttgagccaactctggactcaatgtcctccgagacaacctttagaagtataaaggtggagtcaggctgcttttacaacttggttgattctatttattgaacatttgctgtgtgaatgttcccctgaccttgggtatcattatctatctgtgatagataacctatatcacagatagatagatctatctgtgacagataacctatatcacagatagatctatctgtgacctcggggatcatcatctgttaaagctttcattcattataaagggatcattgagggactagtgtggggctcccacggggattttcagctcacggagatcctttatttatgggkctcaatatggcattgtttttgttttacatttccttctgagacagagagaactcacataaagcctaaatctggctcttgcaggaagttttggctctgtaaagcagagcttccattttgaatgaggttatctttatgaagcacagtattatggttgaactctttttcattcttaaatccataaaycaaaaattcccctgttctactttattacaatagatgttttcatcagcttctactgagttggatattttcagaattctaactttgttgcaagccttccattgtcttcagtgcttctcaaacatgaaaatgcctaggaattgttgggggatcttgttcagtgcagtctctgattcagcaggtctgaggtgagacctgagagtgtgcatttctaacaggctcccaggtggtgtgctgctgctggtccctgaaccatattcaataacaagggtgtttggctcatccttactctgtaaatatcaacttaggctacatcttaatttggtgccaatagtatttcgtaagtttcacaattggattgagctagatcagaaattaatagttaaaccattgcttttttatttcaggaattagcaaaaataagatgaaaaacatctgtttagaaaatggaaaatgcttgaaaaagtctaacactaatggtttgagttttagttgagattgacttctatcatttccttttaaaaaaagttaattcttttttaaatttcaatagcttttgggatacaagtggttattggttacatggatgaattgtatagcatgaactccgagattttagtgcacccatcacctaagtactgtacattgtacccaatatgtagctttttaatctctcttgtccccgaccccaccttctgtgagtctccatagtccgttatattcactctgtgtgcctttgcatacctgtaccatttccttttatggttttcttttagatacatgcagtaggtcaaggaatataggctaaaaaattttaattatttattttaagggtttaaaattttgtgtttcctaaaatacagaaattataatctgaaatactataaaaatcagaatttaacaaaacaagatacagtgttttattagaattacaagcatactgcataggtttgagtttacactatttactgaaaatgacatttttgtagtaacactcaattatagaattttctgattttcaacagttactgctgcattatctgatccatttgttgactgccagttgatactggaactactgactaagcaaaaataaaatcctaatatgggttcaagtattaaggataattaagtatgtatcagaatctttggcagtggttgcatcagaaatttattattaaatactcatgccagttattactctagatagaagactgactttttaaattaatgttttattatggtaaaatatgtataacataaaccttacaattttaaccattattatatgtataattcagtgactttatatatgttcacaatgttgtgcagccatcaccactatttccagactgtttcatcattccaaacagaaactttgtacccattgaacaataaatcaccattatctccaccccctacccaagtccctggaaacctctattctactttctgacattatgaatttgcctgttccagattcctcatataaatggaatcattcaatatttgtcgttttgtgtctggcttattttacttagcatatttgcaacattcatccatgttgtaacatgtatcagaatttcttttagaggctcaataatattccattgtatgtatatatcccattttatttatccattcatttgttgatggacgtttgagttatttctaccttttggttrttgtgaataatgcaactgttctgaacattggtacacaagtatctatttgaatccctagtttcaatgattttgggtatatacctaaaagtggagttactggatcatgtggtaattctatgtttatctttctgaggaactgtgaaactgttttcctcaacagctgtgccatttttcattcccaccaacaatgcacgaggggtccagtttctctgtatccttaccatgaatggtttttgtttattttgttttgtgtgctctgaataaaactatatgaaaaaggttagagatgggggaaaaggtattgtaagcagtaagaaagtaagcagtgatatattaggcttagttatgaagtttgcattttggcatgacactccaatgatctagcttctgattgtagggttctatacctaaactagatttagttagttgaatcttttggagaattcccttcctcagttttttscttctagcttcattttctagtatgtttcacaattaactgccttcccttatgctttcagaaattctctaaacatcttcctagtgaatcttccacttgtaccacagcatttgaagaactccttgaatacctgttgccttcccgccccctgcatcttggttactgcttcccatctgtcttcctttgatagcaaggtagaccattttgttagcccacttctttaggccaggaactgtctctgtttccataatagctctgggctggtggaatagaaggtacacaaaacagattggtactcaagtcatggctagagtaggcctaggccaagctagagagtgggttatgtttctatttggagtgaccaaacagtggctttggatggactttggggtcagggttgagttttttgggaaaattgtccaggatggaagaaggataaagataaagagttcggttggtgtggagatgggattgggmtgggcttagggaagtgaaggaggacaggtcagccacacacagaagcctgcacaacagcttccattgtgttctggactcagaactaggaatattcactataacagtgtgactgacttgaatttcattagaggaatattaaaagcagatgtaaaaaaagacctgtgaaggctctagatcagaatcaactgtaacttggctcataataagccaagttatttcgttattttcttatgtcccatgcctggctagcctaaacccaactaacccagggcaaggacatggctgaaaacaaggaccccagcactggctatacttcttaaggctctattcaaaccaagacacatctcttcctgtcattttaaagcacatgccctttttagcagagggtcagtaaatttcatgctgtcttagaaaatgcactatattcttggagaatgtactttgagctggtgtgttggcttcataagatttgatttttaaatactaaatgcttaaaaatacatgttttacttcttttgtttgagatgaggcttttagggagtaatagacaccacaataaaagctagcatggtttgcattttcaataaaaaggaatttgcgtgaagtgctgctttttctcaagaagcacttgcgtacagcattgcttagcaacacacaaatcagctctgacaccttattcatctttaatattcaggttcaaatcaagcctttccagagatgggacagattgcgtctttcaaaccaagcaagtgaaagttgtcactttgtaattttcatctttaagttggcagcagcatcagaattttcattttataacttcttttgaaattggaatttttttcaactagcctcttatgtccttctcctctgttctcactttgttttttgttcctaaagactcttaaaaggtctttcctgtatttttggtatcaaatttaaattccttaggatgacatgcaaggcccatctctcatagcctctgcttcagccaaattaaacaattcatgttcataaacatgctgttttctttgatatcactatttttccagcccacattgttttctttgcttggcaatactcttagctgggtaagtcctgctcatctttccagatacttctggaatgttggggaacttctttttgattccatcagattgagtaaggggcctcttttcctgaggtcctgtgcaaatcctgatcatagggtttataatatcggacttcatttgtttgcttttctcatcctaaactagaaatcccttcttgagagacagggattcagtctttcatccttatatcctgtcctacctgtgtgtttcatttatctgaatttcttactatttatgacagagctgaatcttctctttttttaaaatcatgatttttattcttttcaacctatctctctctctctgtgtatatatgtatatacagagagagatatcgaaagatatagatatctatatatatatttttttatactttaagttctagagtacatgtgcacaacgtgcaggcttgggaggctccatccgtgttcccataaatgacatggtcttattcttttttatggctgcatagtattccatggtgtatatgtaccacattttctctatccaatctatcattgatgacatttaggttgattccttgtctttgctattgtgaatagtgctacatgaacatttgcgtgtatgtgtctttatggtagaatgatttatattcctcaagatatatactcagtaatgggattgctgggacgaatggtaattctgtgtctcactctttgaggaattgccacactgctttccacaatggttgaactaatttacactcccaccaacagtgtataagtgttcctttctctctgcaacttcaccagcatctgttattttttaactttttgataatagccattcttactggtgtgtggtggtatctcattatggttttgatttgcatttctctaatgatcagcgttttaacctgaattttatgtgatatgtgaaatctttgtgagaaagtattactcaatcctgttgctttaaaaaatatctatgttcttactggtggcgtctccttgatgatgcaattatttcactakatgttgatattttttatgacgaaccacagtgtttttagtttaattctattctgtacagtgtgttataggatagaaataaagtgattttatggaatagtttatcttataggaaatgtatgaaggtgatcccaccaataaaaataaaatcctcagaatgtcattttgcttacatattttaaattatcttcatataactttgaaaacagttgtgattttgccttaatgaatgaaagaaagtttatacatgaacttcaaacacattttcttttctaaggacaatctaattgaggatataagccttgcttttagattctaagagtaggtttttaaagttatgtgtgagggcctttcatggtaccacccaaaagtaggtatgcaatacttttttgggtaatatctccatttaactcaagttctttcatgtacagttttgagtccagttattctctctgtttttataaataggcatatcaaattgctatttgagaaattgaaggtttcaaatttatatttaaaagacaaatgggctcataatctttattgctgtggaatttgttctaagcatctgaggacttcagcagtcaactatatagacaaatattggaggatgacatttgtgtttaatatagaatcttattttggctttttgaaagwgacttcattgttctttattctaagatatcataatctttctagtctgatttgtaaatgcttatttgctaaatcttttcctttataagacatcatacctttgagatgagagtagattgttttaaagataactttttcytgtcgttttgttttgttttgttttttatacagaaaacaagcatcrttgtgggtccaaggagacattttccgatccaaactgaaaaatcgaccatccagtgaaggaagtattaataaaattctttctggcctagatgatatgtctattggtggaaatctttcaaaaacacaaaacatggaacgatttggagaggtaagttttccctaggagattctatcttcttaaaactgatgttctgcatttgtttctcagttggacctatataacatagcagtgtcttttctctggatgccacgagtaccaagtttttagaagtagagccatccgtctatatagcaagaagcagaggaaagaaaccaattgcccttaaaaaaaaaaaagctataatttaaggagtaaattataaaggaggctactctggtaaggggtaatatttatagaaaggaaacagaaaagcaaactttctatttgaaaattaaaataaatatcaagaagaaaaattttaatgtgacaattgaggaaataatacataccacaagtggtgctttgaaagcctcaaattcatgctgatttctaaagtaagtgccaacttgaaaacatgattagggcacttttttaaaaaaaaattaaggctctactgtaaacaaaccackgtaaatagttgatatatattgtctgattaatattcataactacctggtgagttaggtaatactatctctattttataggaaggaaattgcatatcagagatgttctaacctcagtgtcaaacatggttcaatccatgtctgtctgagtccaagcttgtgtttttttatatcacaccctgttacctctgaataaaaatagaagtgatttactaagaattaggattatgagcatttttggaactagaaacaacgttgaaacaccatttgtttggttccactattgtagagacaagaaactggggtcccagaaaatttgtgatttgtgtaaagttccagggttgtttagtagtggggccactttgasaactgggcattcaattcctagtttaggtctttctaccacgttatacctgaggtgaagctaagtatctggtttatacttttatatctytaaaggagaaaaaaagaaaagaaaaaaaggacctgttcaaartagtggaacaagctaggcagcgtgangtgtgcctgtgtggtcccagttacttgggagactgaggtgggaggatgtttgagcccagtggtcgaagctgtagtgagctatgatggcgtcactgcactctatcctgggcgacagagcaagcacccgtctaaaaaagtaaaaaagaaaaaaagagaaagaaagaatatagaagcaacaagtgtagatttacattctattagacagtgacccattagacccggacaagggccttaaaccaaatactgtggctcaagcttagcccacaaggagcccagaatggaaggaacacatcatagctctcttaggttaatgactggcatcccaaacagatttctttttagcaagaaagatagccagagtgcttggagattgggagcatgaattttctttcagggacaaaggatggagaccgttggaagaaatgatttttaagcccagtgctctgttctccaggatggctgctgatgaggtgactaagtttacccattcgagtcatctgtcctgatgaaatgtacaccttatccaaggtcatgttgatgttagagcctttgttgacttttctttgtctctgtgttccagtttcacctattaagagcaaataaaaagaaagggtctgaactaagattttaacatgataatatagctaagcaagaatacctttttcttgctctagtcagcatttcctccccaggttgagtacaagtaaatagggctttgagttatgaactctgaaaagacaaacataaagttaatcccgttatctgagaaacatatttaccttgcaggaacatagtactttctatatcataatcttgattaagttaacatctggtagttagaacgttttattctcatactcttttaatccccaatttgttgaatttaagaaacttaacatttatgtatcactgtgagggtaaggaatgcaatatgattggaattttaaataagacagttttaaatataagtgtatataagtctactcccccgtcttagtccatttgggctgctgtaacaaaacactacaggctaggcagcttataaacaacagaaatttatttctcacrgttctgcaggttgggaaattcaagatcaaggcatcaacagatttggtgtctggtgagggcctgcctagtggttcatagacagcaccttctgcatcttcacatggcaaaaagggcaaacaaactcttaatgccatcaccttgtggggttgggatttcaacatatgaattttgggggctacaaatattcagaccatagcatcccccatcattattttagttttagccattgaaatgctattgtttctgaaattcaagagcagaaatgaaagaattcagagatgccagagaatgatggtatggtgaatattttacacagcatcatgtatgggccctaggactactttattagctagttaatggctttgtgcaagtaactcttacaagcacttttctttccatgcttatctggtgccagctctggaatatcacatgaatatggaaaattcgcttactcaaaattggtcttaacagagttaatgatgtctttattattcttataaattgcacatgggaaaatagattgagaatgctgtaagaatttaatgtgtttcaagttgcatgtgggtaaaagtmtatggaatttctggatttacttagtttgtatatatagaaagtgcaaaaaggcagtattcctcttgagattgacttttaaaaaaaagattaaaagcagagattctaaattattattttctttctaggcctacagtaattttcttgtgattagttactaggaagctctgtattaccagatttggagaattcgaatagagttttttaggccgggcatggtggcttaygcctgtaatcctggcactctgggaggctgaggcagatggatcacttgaggtcaggagtttgagaccaggctggccagcataacgaaaccccatctctactaaaaatagagaaaaaattagccaggtgtgatggcacatgcctgtagtcccagcttcttgggaggctgaggcatgagaatcacttgaacccgagaggcggaggttgcagagctgagatcatgccactgcactccagcctgggcaacagagtgagactcggtctcaaaaacaaaacaaaacgaaacaaaacaaaacaaaacaaaacaaaacaaaaaacaaaaatacagttttttagtgcttaggatgtaggtgaaaggaaaacaaccagaatgttgcaggtcatagtgatggactaagttgtggttttactgaatgttctttgccaacttagagttatgagaaataaaatagaggcttcacctttattgagcctggacttcagtgctgggctgggcactatgaaatatacacagcccatcctgtgggtctaggttaggctccctgctccctgctcctgccttgcactatacttttcccccacagtcctcatgcctccttccctgctcggtgatactctctaggaaggcagagacttttatttgtcttcatcatgattctgtttttggcaaaaggccttaataagtattatgtgaatggatgaagaaggcttatagtttcagagaaaaaaaaaggacagagacatgaaattggtaataatctaagctacacaagtgcattatgtgctcaaatacaaaatagtactagcaataagtgctcactttaacatttaggggcctatgggtccattatggcttggagttatyttaaaagatagaatttaaagtactttatttaaagtgcaaatattaaatcaggatcttagcatgaagttactgtatgccagtaactgttttaggcacttgacattaatgaactctattaatccttacagtagccatatgaaataggcactgttaytaggcccatttacaggagacatacctgaggtagaggtcaaaccatctggccaagatcttgggtacatggtgaggtggtcatttgaacttctgtgctctggctccaaagtttgtgccctcagccaccctcccgggaggcctctcactatactctgctaactctctatgaggtcttcattgtggctttagtaaattatgtacagtaattttgagcaaaactgtaaccattccytactaataaacttcttctggaattacaayggtttttacattttgtctttctactctagggctatagtccaatattagcatrccaatcagtagatgctcttgacttagtgatattaattagatacaggtgctgctaatattcagccaagttcatacaaattgacaatcaagtagacaagaatgtagtgttttaattacatctttgagacattgtgatttataaaatccatcaagtactcataagcagggtacatcttagaaaaatctatgaagtaaaaattaaatctctaatgtcctgctttttaagcacctttctttcccccattatgacagtgaagaccagttctaatctgaatgccattgggatccaccagaggttattaagcaggggagtgacagcacacagaatcatggtgctgagagatcactctggctatggtgtcatatagggctgagggtggaaggccagggagttggtgatggggaggtccaggttttaaaggwcccaaccagtggcagtgaatggggcagccagaagagagatgtgggcagctctgataaattcaaactttttattgatcagaagcagcttattataaagatgacatctttgcctttccccagcacttacatctcataggttcaacatctgagagctgaaaagaactctagagatgacccagccacctttcctagccaatttattaaaatctgctaaaaattccattctcatctttatcttccagttcttggacttctatttttactcatttctatttaaactgtctatttatgtcatttttctattaggactcttccatctttattccctagtgtgctatattctatctcatagatcttttcttaatgagactttccacagcctttcctatagcttactgtgccacgattttgtttaggttttggtcagcaattactttatctagctgaaatctgtggacacgattgtgcatagagaaaacaactggtggaataaaatatttattcttcatgttgttgtttgttctttcactaggtcatcactcatgttttttttttttaattgtacttcttttggtacaatattttagtttactaartgatattactaaaatatcattttcttgccttcatgtagggcagcccagtatccaaaaggaagagagttgctgcttaatcctccaaagggcagtggggcatctgagagcagacccctttcctgtgggggacaaagataggagggtcttccctggactaggtagggttcttcattgttgccagcatcagccaagtggttttgtttcttttcagcagattccagggaatctgcctctcctggactagcttaggacaagagagagtctgctctggcattttgtagggagatgggctggagcctaagggcagaatggaggcccaggttgggttctcctcatttgtcayttgtgaatgtgttctttagtcatcatgaagaatgaatctggtataaggaaggaggcctaacagcacctgatgagaaaagtcttcaaacactcccctggctaccaactcatgagattgatttgtgccacacaatatctgcatttgctaataaacattttcctcccacaggctcttatgacctggtacatcttatcggatcaatcccctaataaatataaggcttattatatttatgtctgtgtgtcttattcagtattccaggaggccaaagtccttttccatatagctttttagtttcttaattctgtaatttaatgtaaatatgttttgaataatgttactatttttcttgagtttgaaggctatttattaatcactgagaattttatagtttatatgttctatctctcatagtcctaaaaatgcccacactttgtacaatggccacagagaaaaaataaaagaagattagtttagacaaaaatagtacggtttacattttagtagattttttcagacctatattgcctgtctggatctttcctccttcttccctctccccaagtctgaactccsatgtggtttcccgtaccctaatccagtccatcatctctcatcagaccactgtatagccgcttaaatgtgtccctcycccgagtcttgacctccaattcattctcacagtgatcaatgggaggaaatatatgcaatatatgcaaatgaggggggtcgtgtgggtgtaaagaactcttacaaatcaccaaaatactatgtgcacaaataaaacaatatgggaaccctcctggctggtaaacataaaaaaattctacttccctagaaatggaagagacacaaatttaaatgatgagatgctatttatgcctatcaaatgtattaaaaatgtatgcagtattgacaaacgtttagggaatacaaagctcttaarcattgctagttggaatttacaatggtacagccttttggagggcaatttgatcatatgtggaagatgactttaaaaggaattccacttctatgaatttgtcttaaggcaataataagtcttcataaaccatgtatatataagagtatgtttgttgaggctgtttatagtgatgaaagacagagaacagcctaacctaggctatcggttaaataataaaattaggcatatctagacaatggaattttatggagccataaaacgacagagatttaaaaaaatttgccctgaaaaacttccactatatgttttttaagttaaaaaagttacaaagcagcatatgtatataatacaacctctttttgtaaggaagaagtaggttgggggttttatatagcacagggaaaattctggaagactgtgccagaatgttaatgtgtgttgcttttgatggtaaatatataggtggttttaatattttttcctgtttacctatactttattactaatgacaaacatatggtaaacatatctccatatatatggtaaatgcatatatatttaaatacataaaaatatatcataaatatatctgcatctctctctctctctctctctctctctctctmtatatatatatatatatatatwtttttttttttttttttttttttgagacagtctctatggcccaagctggagtgcagtggtgcgatctaggctcactgcaacctctgcctcccgggttcaagtgattcttgtgcctcagtctgccaagtagctgggattacaggcacgcaccaccacattcagctaatttttatatttttagtagagatggggtttcaccatgtgggccaggctggtcttgaactcctggcctcatgtcatccacctgccttggcctcccaaagtgctggsattacaggtgtgagccaccgtgcctagccagatacctttttttttttttttgagaaaaaacacctctgccctcgtggtcgtcaccaccgcagccacccgagaggagctggggaagaacagtggcccgcgaggctcatcacagacaatgcggtggctcctgtgagggtgtttaagtaaacttgaggggaggaagtaaaagtatgttaaatctgggtagttaagtgcatggctgtgtattgtagtatttttgttcttttctgattttgagatgtatcataatttacagaaatatttgacctttaagattcacaatagaatgagagaaaaatacatgcaaagtaattataatttaaaatgtactgttatttaattttctgtttaactgtatatcttttaaaatgcttttattcttttcaagcaatatatgatcacagcttaaaaaatatcaacaagcgttgaattctagcaacaaaaaatatcagtctcctttctcacctttctgtatctctggacccacttccaaagggggaaacctctaggaaaattatactattatttttagtgccatatttctattataaatactttgcttatgttgctgttttttaattgatcaattttggacatttttgtattgcctcctggttgttgtagacaggatgcagctcttctagctcactgtcaccaccacttcccaatataactatattcgttaaatcaaataatgtgcacattattactatgtaaacattgttcacggttgagcttagtagtacactatgactgttttcttttttgacgctctctttgtgtgtcctagacttaattgcctttttaaatttgcatagttttctatgcatttaggaaaagataatgctttaaaaagttgtgccaaacaattttaaattttttcaaaatttcaacacagcaaaattccattctaattccattcttttcctgaagacatttctcccttctaacttggactggttgttcttagccctgctgtgtgtgtgtgtgtgtgtgtgtatgtgtgtgtgtgtgtgggtatgtgtgtgtgtgtgaagtcctaggatcagaactatatagcctgattctataactcttcttcatattcttcagttagatccctaattttcttggatctcatgttatctttccttttttcctgaagagcatatcctgtaatagttttctcagaaagattgtatgggaggtaaatttttatatctgttttacctttatacttacctgaaaggttgaattttagaattacaggttgagaatcattttatatttagaattttgaaggtgtttctagtgggaaacataaagatcctcctagttggaggaacaaataagctttcctggtacaaaagcacccagttgacaatgaaactgattgtggcaaggattctgtcaggtcctcctagaagctttcttagccattctcatgaggacctatgtgttttttggcctcacctcatattcaggaaactctggctctgtgctaagtaactgctaacatcccagcacgttgagtssttactgcagcctagtgaagctaagctcaccttctcaggtgcaccatcccactggcaagcctagctgtcagaccttcctgatttctgttcttgcaggcttcctttgatggtaataagttcctcccccattggggttgtatggatagaactgaatggtaaaactgatttctggagattttttagaagtgcaacttgagactctaagagaatcctctgtcatgaagactccatgatcctgtgactgttgagctggtattcttgcacaggacgacctttcctgggatcttgggctgcgtcacttgcacccrttctttaagggattgcctctaggaagcttttgtccttattctttctttcccactggccttgtgctttgcatttctttatttcytttttaaactcagagatgtgatggtgaggtttgatctttttactgtggaacccaacataggtggccrggattgaggaggtattgcgatgagaaatgactcaaatgtgacttgatggaagtacatttttcatcaaacaagagttctagttttaaataggggaggggactattacggctgggagggattttagcaaatccaagcactttgatttttcagttgaggaaaaaaggcaaaatacagtcttcactggtgcaatgacagtgtgctatggcatatattttagaaagaacattgcatcttgggacaagaaatctaattttgaagtcacacaaaggtcattaagagcttatgggagcttgggcaatattcctaacttccatgagtatgtccttttttcatcgataataagggtaccagtgcctccccctgcatcagggctattgaagagactagcatttgaagagactagcatggtacttctatttttcaaactttaaagagttatttcagaaggwaagatctagtgaacatggtcctttaaatccttctgaaaagggcttgtgtgcttttactagtgttacatgattactgtgttaataacttactgtataratatcctaaagtatttttatcttgtatttttgtaaacaggttatggaatttgcagtgatgggtcctggtagtatctaaaaacatatttgtactgcatctgtgggcccttctgtatctaggctatattccaacgtatgattgtgtctgcaggagagtctcctctgttgctgtccagtgtaacaaacagctccttgtatattctaccacatctattcccatgcttcattgatttggaatttgacttgttgcctgttgaactggcaaatagttgagtgttcttttgtgtaaactttgacaatgctgattcacagtacctttagtgacttaatctatattaagataatctgtataaaatgtatctatatatgtagtctgttaagaaacctatataaagccaaattttgacctttctatggaacgtgtatttttttccaggataacttagaagatgatgatgtggaaatgaaaaatggtataacccagggagacaaactacgtgccttaaaaagtcagagacagccacgtacctcaccatcctgtgcatttaggtagatctgttttaaacacttcaatttatagtgtgcttccctttgtgaatagaacatttcatcttctctttaatctgtaatcttctgttttgaattttgttctacaaatactaagtttactattttgtgttgtttattgattattttatcactgttgggagtagctaaagtttagaagtttattgaaagcaactgctgccatctcagtctctggaattctaccttaagctgcaaagcagttatctctgggactctgtttcaaattctgtttggatttctccccttctgctgtgaatgagtttcttgtcctgtgttggatcctcacaggtgtgctgaggctgttgtattgactcatagtgtatataaaagtattgtatgccagtctctggcaatctaagctagttcctcagctttaccttctatttttgaaaattgaataagcaattcttacctgtgcctgtaaagttataagccatcttgactttgaagtctcaaactactcaccagaatcaatgatgggacttgacttctgatcacatttgaaacctgctgatagctcagattgggtttaaaaaaaggggaatcaaaaggtgcaaacgtttgtaaatatcatcattttttaaaattacaatatactgggtggcaaggccccagtccacaaattaatataatggtaagcagcaacatttttttracttataaataagagatacacatagcagaaggatgttttgccggtatggtaaacaccaaacagattcacagggaatttagttttcatgtgtaatctgggagaaactataacactgtagtcagattgggtctttactgagttcctgatctaaggaataaaggttcatattgctcaaagatgaggttatcattttctgcagtattatgagaaaaggggatagcaagcctggttctgggtartctaatatccatttgcaaggtttctcccttttgctaatttaatatttttactggtttgataccatttgatgtgccttgtggtctttgtgaaaacgtgtgccctggtgatatgtgagcatctgtctttgatttccgcaggtcagatgatacaaaaggacatccaagagcagtgtcccagcctttcaggtactgccaatgaggttgaatgtctagtagcttgtaaatatatgcttccttttagccatgtttcccaagcctcaaacacgaaaatcaactgtacacagctttttgctttttaaattgcttcctttctcttccatattgtttatgccttatttttaatgctcaccatgaaaaggatttttttttttttgctggcatgcccacaggactgtgtggtggtggtagagacatcaatgtattttgtgctcttagcacattgtggaggggggtctctaagaaactacaggtgctctgcatttctccttttgatctagtgatagatctagcttaaattgttttcatttttattggtcctctttctattttttcccaatcagcatgcatttgttcccctcctttattttctagtcttattttcttctctaccttccttttcaagaggaaacactagttttgttctgtggaaaaatgtcccctgaaacctccgggagtggtaccacgatctggtgtggcactcagtgagagcagcagagatgtttggccaagagtgttgatgaaataggggaaagaagctcttcacctgctggttcttattcattcttaggtttaggactgtttagtgagggcagttcaaagagggcttaagcttctggagcttctggagaagcttgaattgcttctttgtagaactttttccatttttattttggaggcaaaacatgagcttaagctgctgtttggtgggtggataatgaagraaagagtctacaagtaaataagcttttctctagcagagaggaaaacagagttcagctatattaaatgatttatctaggatcaaacagatttggtattaagattatgactgggccctggctctccagatttgagtcagtttttcctttttgtccacttggcaaatatttattgagcacctgctcagaatccagcattgtgctagccactgggaattgaaatgagagagaagtctttgccctcaaggagcttacatcaggtaacggagatagacaaatatcagatgacgcaatatggtataagagctatgatttactatgagaatatatgatgaaacatatattgcttgggaactcagagaaggcttgcttgatgaggtaacagctgattggaccattaaaggctaagtgtgatagaagtgggtcaaatggacatggaagataagaggtagaggatgggaaggagatgagaaaatgccatggcagggaaatagtctgtgcaaactggacaaacgtgtggacgctacccattcagggaactcaaggcattcttatgtagctggaatagagatgtccaatgggaaagtgtggaaagaaggacctgtccagattttggaggggctgcatatgccaagccaaagagtttctataggcttgtgggcacagaggaaagatgaaatgrtttaaacagtgaagtgacatgattcactgaaggctattcacaatttgaattgtttaggaataagattaaaagatgccacttgtagtcaaggataagaaataaagatggcctcgcctagggtagtttgcagggtgaaaagaagaggatggatttgacatataagaagtggaatctaaggttgtgctgaggaatgaataccagtggcaaagaagggcagtggcccaggaagacaggatcatggctaagagcaggactttgactcctgggtttgaatcccaggtctgctgttcactaactgagtgactggatgaggaacttttcctctgtgtttttgtttcctcacttgtaaagtaaggacagcaatattagctacttcktagggttgttgtaaggacaagctgagctgacatctttaaggttcttagaacagtgcctggcrgttagtgctgtgtcagtggtggctgccgctgctgtcatcactattaggacctgtcatgatatctttaagattgattaatttatcttgtcctagttagttgctgaatgtttaagataagactactttattgtgacactttgccatttttctccgcaaagattaagttcatccctgcaaggatctgcagttactttgaagacatcaaaaatggcactgtccccttcagcaacggccaagaggatcaacagaacttctttgtcttcgggtgccactgtaagaaggtaatttttctctccctcttctaaggtgctggtttgaggtaaaggaagcttgcagcaggcgatgagtttagctgcagttttgtcagaggaggggacaarggagaagaggagaaaccacggaagaccctgtgatgttctggggcttccgttcctgtcttgggaaggcaggagacaaggttgtggagggaatggtgcaaagcgtgctcttcttctagagagtgagcagctggcttagtgtgatccagaaaatggagttcagttgtatatacaaatgatattgtcatttctcagctgacacgtataggcaagggagaactaaccaaaatgggtagggatgtttgatgtagtcatgtgattgaatatgtacttaagtctgcttttaatgctccccttacatggcccttttcctttacttcccaccccagggtaaataaaactctgtgatgttctatttcaagatctgtagtcaaagtgttttagccagtttcttgggtcctagttaactgcttttgacaaagcaacttgatatgtataactcaaggctacatattatcataacaccaagggtgatgaggaagccatcctgacatcattcacattgatcagattcatcttcatcatgttcccctaatgtcatgagtatgtgttttagaaacgtgagctctgtgtgattgtacattgttgtctgttttttccctcctcacttgtgttttccattcagcttttccataaactcccggctagccagttctctagggaacttgaatgctgcaacagatgatccagagaacaaaaagacctcctcatcctctaaggcaggcttcacagccagcccgtttaccaacctcttgaatggcagctcccagccaactaccagaaattaccctgagctcaacaataatcagtacaacagaagcagcaacagcaacgggggcaacctgaacagycccccaggcccccacagcgccaagacagaggagcacaccaccatcctccgaccctcctacaccgggctttcttcttcttcagcgagattcctgagccgttctatccctgtaagtgcgcagacaccacctcctggtcctcagaaccctgaatgcaacttctgtgccttgccttcccagccgaggctgccaccaaagaaatttaatagtgccaaggaagccttctgagcgatgccttccctctgtgctgtgaaactgtctatgcactacattctgctagctcctcttcaagtaaacgccaagtcacaactgggttttcttccttccttctttttcttcttacccccaactcctttttaagtagtttctcttaaaagggaaatagctttcattcttttgattatgggcattgttgacttcagttacttttcagttatgtttccaatcactctgaatatctggtgctaagccaggagctgattcatacagtggatagcatttgctgggggtgcgctggtttggggaattatggctttttccgcatcatatatcagtgaattaattttggagtattgaaacgtggaaggtgctgagtgaacagtatcttcctagaactaagcattaggcccttgaatatttcacctcctgcaaggaactgacccagaataaaataagtggcaagtggaagatatttctaagaagggcttataggtaggtacctgggatgcaaggtggggagcaagcagagtatcaggaaggtgtttaaaagtagccagcactcttctagagaaaggtgggaagacctccaaacacatcttaccaatgagatctctatttaggttaccaagctctctttaacaatcaacaatacctggtaaggtaaactctgttggtaaactcctattatgaattactttaataacctgttttgattgcctctaggggtattgagatctataggaatgtgagtttcgacttgagaggaacaaggacaaataggaaggagaaatcaatcctatgtattaaggaaatatgaagcatggtacatatacatacagtgttgcaacactgatcgtactcagggcatgaacaagccctgggtgtcttggaaggctctggcctggtgtcgcttcacacttgctattcttgaaacatttcctcagccgtcatctagggagtgcctgcttctgtagagaagaggggaggaggaaaggtgctggtggcagtgtgctgcrtatggcccactcagcaaaacaggagccccatggttcattcttaatgatatctactttctttagttgacagtttagaaaccatgaggatgggccaggctcagtggctcatgcctataatcccaggactttgggaggccaaggctggtggatcacctgaggtcaggagttcgagaccagcctggccaacatggtgaaaccccgtctctacaaaaaatacaaaattagctgggcgtggtggcgcgcacctgtaatcccagctaccataaggcaggagaatcccttagaacctgggaggtggaagctgcagtgagccaagatcgtgccacggcactccagctgggtgacagagccactctcaaaaaaaaaaaaaaaaaaaaaaaaaaagaaaccatgaggatgaggatgttttctaacatgagaatgcagtgtgtgtgtgtgtgtgtgtgtgtgtgtgtgtgtgtgttcatgtgtggttgcattagattcattaccactcctgtccctacctgagacctcttttaaaacttttaccctctctgtccactctcaacccattccctaagaggagcctggcatatctgatgttccctgtcctattttacaggcatgagccaccatgcttggccttggcattagtttagattcttttacagattagggtcccaggaaattgccagcccatctaccccttaatctgattctgatcccatgatcccactataaaaattgggtgtataggtatcataaaaacttaaatccatgtaactaaggattagatgtaaaaagataatatatttacattttcctaactatatttataaatcatatactttccagcaggcattgagttcagtcatcattttcacataccgattgtggatcagcctcttcttttggatcagaatgcagatctttccattttcagaaaaagtgctagagatatatagataatcatacagtcatgtgctgcctaatgatgttttggtcaataacagaccatgtatacaatggtggtcccataagactataatggagctgaaaaattcctattgcctagtgacgtcgtagccctcgtagggttataactgcagtactcatgtgttgtggtgatgctggtgtaaacagacctactgtgctgcagccatataaaaatctagcaatacaattatgtacagtgcataatatttgataataaatacctgttactggcctatgtatatactatactgtactttatatcgttattttagagtatacaccttctccttattaaaacaaaagttaactgtaagcctcaggcaggtccttcaggaggtattccagaagaaggcattgttgttataagaaatgacagctccatgtgttactgctcctgaagaccttccagtgggacaagatgtggaggtggaagacagtgatattgattatcctgacctggtgtaggcccaggctaatgtgtgtgtttgtgtcttcattttaaacaaaaaatttagaaagtaaatactaaagatatttaaaataaaaaaaataggataaggatgtaaaggaagaaaatacttggtacagttacacatacaatgcttattttaagtgttaatttcaagtgattgggagttgataaagacattaaaaaatagtaaactaagtattattacaaaagagtcaaaagttaaaacaattaagtttataaaataaaaatgttacagtaagctaaggttaattgattattcatgaaagaaaaatttttaatatagatttagtataacctaagtgtacagcatttataaagtctacagtagtgttcagtaatgtcctaggccttcatgttcactcaccactcacccactgactcacccagagtaacttcccttcctgcaagctctatccatggtgagtgccctttacaggtgtacaatttttaagtcttttataccatatttttattgtctattttctatgtttaggtatgtttagacacacatacttaccactgtgttatagttgcctgcaatattcagtagagtaacatgctgtacaggtttgcagcctagaagcaataggttataccatttagctcaggtgtgtagcaggctctaccatctaggtttgtataagtgcactctatcgtgcacacagcaatgaaattgcctaaggatgcattctcagaatgtatctttgtcattaagtgatgcatgactatgtaaataccttgcagattacatacgtaaaggtattgtgtaatccacatttatagctgaatgccagtagcattggtagcttgacaagaataatgttctacttttttgttttcctctttgctggtagaaccatgggggcaattctttagacaattgttaatctcccctaatgatgtttacataacttgatttgggtctcgttccgtattttgttatttcttttcacttctcctcctcctcgtccctcttctggctagaatagagtgatttttaaataattcaatttaagtaatagtctgtgtgggcagttgctgccacttcccttctcctccctcctaaatttatcatcttattgtaaagaaaagcatttataaatagaattatcaacacaacattttcctccctctcaccctccctggaagtaagaagcagcaggtctttgtagcagaccttcccccctttaactttgcttagaaaacctcctgtgagagggaaagctccaagtcctacttctgctgacttgtggtcaaaaagctaaattatgatgaaaattcccactttgtgtggaataagataggagattatgagttatttttgtttatggtccagtgcagcttgtctaattatactgggtttattgtcgaaataagatcatacttctagttctagtactactgaagatgtgagattaggagccttgaagaactaggaaaatcactcaataaaaatgttttaaaattcttaggtaggaaaatgaagtctgcatggcaatatcctcccagaacctttaagaaagacccagaaactcttaggggatgggggttatgggtatttagagggaatctaatattttaaaagctacaattagcatctcttttgaaagctgcaattgctcactcactttttgcagcagttcagcccccagaaaaatgtaaaaatgatttccttattctgtcattaaatcgtttaacacagaaaacaagaacaaatgttaaggattccttatggttgtgacagaatgctgaggaacagtcagattttatttttattaatttgtcctcttttgctagtcttgcagtttctactgccctgtgcaatgcacacacacaaggttacatttttgttgacccacttactgtaaaaaatgagtttcactccctgacactcagaggagttttcaaatgcttaagaaatgagggacatgtgattatggtgtaggtggggtggaagtattttattaaattgaaattacttgtggtatctgtcttgaatatttgctatgctttatttttatgacacttaatcactggattactagtcatctacattgaccttacctgacccccaactctgagttagttcatgttgcttctcccataagcctctctacatcccaccttggtctaaatcagaatactctttttcactcagaatttgcataatccactagactatatgctttgtgagggcagggatggtgcctctggtttttatagttatgtgccctgtgcatggcatatattaggcactcattaagtatttgttgattggataaaatgatggatggttaaatgaatgaatgctctgtagctttaataataaaactatacaaataagtgaaacttattatagcctgtaataagctttgttatgcactcttctatcttaatcttcaaacatttgcagggatattctcatagtgaaggttgtaggtaatgtcagtggtgccattgtctcttggaatttttcctttcttctccattcagttgcttcctcatccctgttgtgtttgagtctttgatgatcttcctaacttgtctctttccacctttaattcttactttaaagtagggttggcaaactttttctgtaaagggccagatagtaaagatttttagctttgtgtcccaactattcaactcaatacataaacgaaaagtgtggctaatattaaataaaactttattaacaaaaataggtggtgggttgcatttggatagtgagctgcagtttgccaacccctgctttaaagcattgccagataagagatatagatttcaacatcttatttccctgttcagaaatgaccagtggtcccttagtgctagaacataaatactgactttctttgttgagctttcaggccctctgtactgcatttctgtagtattgtatctttgcaccagcatttaccttgcttaytctcttgttttcttctcccacagtgttcatgcctactgctagtctttaggaagccctttcttggaagccccctgctctccttaccaatttctcatctttaaataaagacatatattacctcccatgtcttctgtgaagctctccccagtaagtggaatccaccctataattaatactttattttatcatgtatgctattatatacatgaacatctatatttgtttacatattgtctgtgtatgtaagaattgtctccaaatttaaacttcttttgcagacatttcaaaaagttcttttatagttcatggtttctaacacagtaccggtcacaggagggaattaaaaattaaaatactcatttggttgaaagttgaaagcaaaatggaaatgaaatattgtgtgcttcctactttccctcagcattcttatatgatagttgaagttggcttaaatgtagttctcttttctagtgttagtagcatttttatactcagttggttaatgctgctctttggttatgaagactctgtggatgttttccacctcaaatttgacaaacgtaagaacaatcttggtagcctatgaataggttaagttcttctgtgttctaacatcaggcagaatacgtatgtgttttaaggaattattggtccttaaagtaggacctggaatgagatcaaaatattagaatctagctttataaaataaccagtttgatgaaaatctgagtgattggcagtgcactaaagcatggttcatttgtactttgggataatgttagtgctgacagtgataagctacttactgattgtttgaatatccattcccagtaaagtgctgatactttccagtggtatgtagtagtgtttcccgatatcaacttgttgtcttttccctctgcctgttctccattttaaaaattggtcatcttgtcctgattttaaataggacatttttattcgtctgcttttgtcgctattaagaaatacctgaggctgggtaattcataaagaaaaatggtttatttggctcacaattctgtgggctgtacgagcatggcaccracaacctgcttggctttgcgtgagtcctcaggaagcttacaatcatggtggaaggcaaaaggggatcttgtgtatcacatggcaagagggaacaagagaaagggaggatgtgcgaggctcttttaaaccaccagatctcatgtgaactcatagagtgggaactcactgattactgggaggacagcacaaagccattcatgaaggatccaccgccatgacccaagtacctcccactagccccacctccaacactggagtcacatttcaacaggacatttggaggggataaaacatccaaactatatcaatattcatttattaattcatattaatattgttaaatattaactaggtgttaatatttattacagttaaaggtactagctttctatcctcttgttgtatatttatgttgctgtggtttttcatccttcctctttgttgtggcattgctttagatttgatgtaagttttcagctaagggatactaactacatatcaagaacatgagctcaatctcagtattgaaccacatctttggccttcattcaacattgcgattttttttcccttcccaaggggacctgagaatgctacttgacaaagcatcaaattgttatgaggtcagcatggttcggatgatgcctttaaatatgcatataaactgtttatatgtttgcagtatttgtagatatatgtaactataatttaagtttccagtgttaaatagtagtttatgttaattttctgtataaagcctgtcagctgtttttgactgtacatttgaaaagacttgaaaacataaaacttgctttaagtgataaggttgatcagaaatatataataggtaaggattaatttatattttcaatgtattagagttatgaatcaccctggttgttcagcttaattttatactttcttatgtagtgtcaataatactactaggtcaatagaaaagagtcttattttaatcttgcgtcttatttttttggctaggagtaaaagaaagcaagtgctttttatatacctataaaagctggctaggtgcaatggctcacactataatcctagcactttaggaggctaaggcgagaggatcacttgaggtcaggagtttgagaccagcctaggcaatacagagagaacccgtatcttaaaaactgaaattaaatgaaatggaaacttatccaattaataaagctatagctaatatttatgtaagtgtctagcttgagcctagtatttttttggtagagcaaggtgagacaaatacatacaagccattgtcctccactagattaaaaacttcatgcaggcatcttctggtagaattgatttgctctcatttttctggtcctttctatttttgcactgctgccagaatccacttaaaataccagtttcctaatgtaagcctttgtttaacagcttctgtggttgaagaataagaccaaatattataagatttttcctctttttcctgaaattctgtagtttcaccataatatagctatatacagattcattattatttatcttgcctggcatcagtgtgtactttcaatcttagggctgcttttttagttatggaaaattctcagccatcattcttctttttttttttgtagagagagtgtcttgctatgttgcccaggttggtctcgaattcctggcctcaagtgatcctcctgctttggcctcccaaattgctgggattacaggcttgagccaccacacccggctccactatctttttggatattgctttactgcctttccccttatttcccttattttctccttttgcaatagccccacaatttttttttttaatagaaggagtctcactctgttacccaggctagagtgcaatctcagctcactgcaacctccacctcccaggttctccacctcccaggttcaagtgaatctcctgcctcagctttctgagtagctgggactacaggtgtgcaccatcacgcctggctaatttttgtatttttagtagagatggggttttgccatgttggccaggatggtctcaaactccttacctcaggtgatctgcctgccttggcctcccaaagtgctgggattacaggcataagccactgcatccagccaatagcccccaaacttatattggagactttcaatctgtcctcaatatatcttaccttctgttttatatttttcagttcctaagctctagctgtattctgattgaattcctcctattattttcaattcgtgaattttctttaatgtgtccattctggagtatatcccccaatccactgacctttgatttcaggggctatatctttcttttccagcatttctaatttgatccttatgatagccatctgttataatttgggcccgcctgtttttgttttatggcttcttattctttttatatgtgtgtgtatatatatagatatatatatatatttttttcacttgaaggatctcaggtgataagccattttgatattgctttgctatttgcatttcatcctgtgagagtttgccttgtggttgcatacttcgtcagttctcataatgttcatttgccttgtgtgttagggaatttggttggtaggttcagatgggatgggagtgttggtgtgtttctctcctctttctctctctgtttttccctcctcgtctgctggccttcttgttggctctgcccgatcatctaggcctttcagtctagaaacagaccttaatgacccaggcttccatctcttggtgagctcctcccaggctttcttctcaggcagggatgtggctccatctcagccctggcccgagggcaatggtcccaatttctctcagcctccttccccatgtgggagagcctgactccacccctgatttcaggccaggggctttcgacctatgtacccacatgaatggaacacccagccacttctgcaggcttccagctgtgtagccagagtcccaccactgtcttgattgtttctgggtcacaaagatgttgatcttgcttttaatttctgctgtgccctttctttcttcttcatctttaaaaaatatttaatgcatgcatccagagggtagtttggagtgtaccatctcgacatgaagtaggtccagtctctgcagcttgctgttcagtgcctttttcagctttccccaaccagctttccaaactcatatccctccactcctgagcatgaaccttctgcttctgccaggcagtttcttatgtccttgaacgtgcatggctcctcctacctctgtgcttttcttacatgctatgtccccaacttggtctcccttcctccctccctttgcttctcacctcctttccatcaggagttgggctaagtctaacctcctcctctgtgaagccttccttaatctcaccagaccatagcaatcatgatgttttttgaagtcattctgtttgtattggttattggccttcctcatccctcttttgtgttgagagtcacctatcttgtggatgtgggccttgaatccccactgaattccttgattgaggttagaaaatgtcttttatttttgttatctccaaagcatctggcattgagctatgcttacctgtttgattgtgggtatactcagtccatacttgcatcttttctaatactgtgtaggtcatttgtttcttccaaaaatttgaattttactgtgtgtgcacatgtgtgtcagatctttaacttagaaaggcatatttttattgcaccttcctcttacacacacatacacatacatgtggatgtgcatgcatgtgcaaacaagcacagacaccacgtgcacattgcttgtaaaatcattggatttgcccgtaacagaaacctttggtaaatgacgcaggctctccttgatagtgaatgtctaaacaactcaaaggttgatatatgtgggagagaactgtttttatcagtttagaagtagatatttttctctcttgggcagactgttgtgagtccttcagccttctgttatgaaaaagcagtagactgtaagagaaaatcatgaagtctcaatttgaaagtgagcaaaataaggttgacccattctatctcattttcccttatttactctttaagtacacattacttactctctggtagctcctgaatctttatggttaagargggaaaggctgtgttcccatttcctattaggaacctcgtttccatgctctcctgtcttttgaaaacatcatccaaggatactcatatckttttgtcctcatcactgttatyacctcccttcatccctggaagacttttgcttctactttttagctgcctgggcactgccaacattctggacaactgtaacatttttctaatcattatcatcatccactgtttcttgaataccttctatgtgcctggcatggtattaggtactttatatccattatcttatttatttaacctgctatttacagatggggaaatcaagactcagaatggcaataacttgcccaaggtgtcacagtgatcttattttaaactttcttaacctcagttatctttatttttgttcacttgaaaattcattgaataaaccttcttattgcttagcacattgcttctgacatcttgaatcctgccagcctcctttaaacatttccccctcctcctaactctgctccatgacctctttctgaccctgyctgtttccccagccatctcagttcacctctttccttctacagcctgcatagtcatttttgcttcctttttccaacattctcactgctacttggacattctgtaaccacttgattaccagcctccaaaattagatcaattcaaccatctgttgtatctgttcctcatctctctcctgtgagcactgttggagaaaatcctataactttgccaattggctccatctcaaatgtgtttctaatttacccggcccttcagtgctcctaattagttgttttatccctttttggctccttttctcttccccacctggctgttccaaaactttttaacatttttcaccaacacaaccccttcctgatctccagagccagctgaccctgctttgagatctgctaagaacatagaatttatcagaagtaatttcytctaacttccctcttctctgtctcaaagtttatctgcatctggactcatccatttcttccttcccttttaattccaaagaaactctactgttttccaatgataactctacctacctgtactgttctttccagaatctttcatgaagttgccctaaccacttccttctccttttgtatcttcagcctcttaccctccgtttgcaggtctcctcaactgcaaatgtgcacatccaagttggtaggctggtgggggctggggaggagtcttcccttggccctgtcttcctctcacagtttctcctttatggccacacttggggaaagagaagcctgcacttccccctcccttgtctctttgatactcctccgctctacagctgggaggtggcccctcattctggtgaaagtctctcccgcagattactgccgacttcttcaaggccagatctgatgggctcctgttagtccttctactcctaagcctgccccttaatgattgtccttacattggctctttctctttgggtaacctcctgagcattggacctacactcccagcttcytctgggtgttacctgggatagagagaatacaggttccttccattgccagctcctctttggtttcctagccgaataatctcatctttattcatccagtcatccaagctagacatttggagtcagctttgacactacttctgcctgcctttcccttgtcacaccagtcactaagtcctatcaagtctccctctaaaatgcctctgtccttccattcttaccactgctgccttaattggggtcttcatgaactatcgcatagccctttctgtcttcctgtctcttacctttaatctttcctctatactgttgccagtgttaaatttctgagacacagagctaatcaaatccttctcatgtttggctttgttcagtggctgcactctgcctactgggtcaagtctggctcccctggcttggcattcagggttcttccctgtcgggctgtgtgcctccctgccagcctcctctccagcagctctacctggcacgacctgccttaagcctgaaccctagcacttgcagtccactctgctttcccttgtttctctgcttgattttgtatttcttgacctggctcgatagttatctttttgataagcatttgtgacccatctaaacagaatggctcttcctttctcgactctcctaggagcgctgacactctcatattatagtcagttatacatgattctctctctcctctgctttcctttaagcttctcagaaacatctcttgtttcctgaggttccacagtacagtataagtgcctaataaatacttattgaactaaaagtcagataatgtatctgggttcgtgaatgttaaagtgtttaggagcctgggtctcattgttagcatatgaagcactaacagaaaacaaacaagtttccagctttagctttaatatacggtaatctgggagttgtgtattttttttctagaaatgtggctttactaaaataagagaaaataaattttaactgagtttgcatcaatataattttggtgttcagatgaactgaaaacactcatgtaatggttggctgagtcaagctgggtgtcaacaatctgtcatctaacaattgagctctttgtgattgttgaaaagcatatattaaatttctccagaaaaaagaatctattaaaaatcatgtaggaaggtgaaagactattttatatagcattataatgagcccaaattggctttttaagtcttgaagtccctgaaatgcacagagaacactatggaaaaatgcacacacacctttcgaacctgattttaacacaaaccttcatccttttatcttaatatgatgccaataaaaccatacccagctacatttcatctagtgttattggaggaaatatgtatcatattaacagaggcaaattctttcagtattgtacatgttgggtacaatatacactacttgggtgacaggtgcactaaagtcacagacttcaccactatacaattcatccatgtagccaaaaaccacttgtacctcaaaacctattgaaataaaaaataaaaaatactttcagtattgtgaaaccacagttatggaaataagtatcaatgcacacattttatgtgttaatttgtgagcaatacaaaaactggaaactctattacaaaggcttaaagagacataggagtacagaggcagttatgggtgtatttatttttccccagtgttgtatttgttcattaaaacttaaaacactatagttatgtatataaaataccatgttgccaagcatgtattttttcctttaatttcaatcacattaaaacaaaccatttttattttaggttctttttgcctctgtggttagaacttaaaccagggataactagtacactattgtttattccttaaaggactggggaaaatgtaggaaagaaaatgtcagtgtggcaaaaaagtccatgaacattttgaatcaggattttgaccttagtaggatgctaacattccaggccattggatcctttggttcaagttatttgaacattaagacatcgttacattcatttgctgtcaaggaccttaatctttcattattctttataatttgctgtttttgatagctaacatgttttatttattaaccatctgtacaatatttatatctgtaattattagacatgttcctgccatgattaggtaactgggctgtttaaaaaagaaacacctccagaatagctaaaattttaaagttactacctacatctgccaaaacagattagtagcagatttccagaacagaacaaattgtcttgatctccttacctaacactttgttttatgtcaaatcttactgctttcagggaacaagacttcttgatggaagcttatattttgacataaaaattttgggggctgcaaatgtaaggcaattttatccttatttttcaggttgaatattgctacattattaattttatggtattcatacaataagaataccacatattcataataaacttgatctggtcctaactcactataactctgttgagcttactaattaaatgagcttgaatattatatttgagaaattaaaatctcttgttatataaacaagggctaacttctaaaataatatttgtacttcaggtataaaaattattttcactttataaccatcttcactgtcattgttataatttattttgtatttcagattcattaattcattattgtaacaactaaaaacattggccaatcagaattaaaactttaatcaactcataatacttaagcatggatgttcttataatgaaaatttcttttaaatttagaatattcctgaaaattctttgaattcaggcctgatgaaaatcattcaaaaatrtatttatcttttaatgcaacaaatattttttaataattttttttattcactcagaatcatatcttgcctaaggtcattatttgtctatgttagggtgatagagaatgttggattgaatatgtagtgatcacaaggcaaatgctcgctgtcttgagacattaaactatggtagctaagggtttgagctttagagtcagactgctagggttcaaattccagctccaccaattcttaattacatgaattggggctaattactgctttgtgcctcagtttcctcatctgtaaagtgggttgtctgaaacatttaatgcgtgaatatgtataagatgtttagaactgtccttagcatataggaagtactcaaatatctagttcagaataattgatgtgtcaagtaatatatctaatttgttaagaagttcagctagttgtatttaatctatttttgaatacgaaaatcaatagcaataatattgttcatggaattcaaaatgcaaatgcaattttactataaaatgtaattttactataaaaattaaaaatgccagtaactggctatagtcttttctgggatattagtaattttacaatacatggacatttggaaaacattgtatatagttggtagtcctacctgtgactacaaaaaaagcatgaagttatgctttgttacgatgtgtattaggtcccaccaggcactcatctggcttatctatctaacctgtctaagatttgaaatggagagtacttgtgtttttccttgaggtttcctcaactgtggctgagtacaaatgacccagagagaccgtcagcacaaccccgtaggataaccatgtgatacctgaagtttaaatattcctgtcatccaacactgttgctccctgaatagaaaggtctcacagtgttagttatgcttttgttaagtgaatagatcttggagacttgaacaattctcttctccccttagtgcatttctttctttctttttttttttttttgagacggagttttgctgtgtcacccaggctggagtgcaatggagtgatctgagctcgctgcagtttccgcctcccgggttcaagtgattctcctgcctcaacctcccgagtagctgggattacaggaatgtgccaccatgccctgctaatcttttgtagttttagtggtgatggagtttcgccatgttggccaggctggccttgaactcctaacctcagatgatccacccgcctcggcctcccaaagtgctgggattacaggtgtgagccactgtggcccccttagtgcatytgtattaagatttttattttagattgaaaatgaaaggaagttaatttgttacaaaatactgatgtcagaataatttgctgaaccctttttactgatctttcatttcacttttcctttataccatataaagaaaccatggaacatgttttgttttgaggactttggtattgtatttttatcctctagtgcttaatagatacaacttatgttcagtaattatttgttgaatgaattgaactggtgggacagaaggtcaattcgttggccaaatggtgtcatcatttgtttgcagaggcctgcagggccagttaggcaacataagagagcaaactagggggttggaaaaggaaatagtggggcttgtggtgagctgtatctgagcctagattaaacaccagccagagtttttgagctctgtggaagtaaaggctttggatagaagactaatgaatatattctccatatgaataatagaaatctttaaaatgttctagactatttctgttttccagttcactgggtactgtgattcactaaataaataygtaaataaatgaatatatatatgtgtgtgtttatatatataaatatatgcacacacacatatttgcccctctatattgatgtacatatgaaatactttaccctataaaaaagttggtttaacaaaggtcgcttgtctaatgtttatttgctacatctctgtttattgataattgatggagcttgcaaaaacaactttgttctaagttatatgcagtttgaagaatttctgatttctgttagtgataacatgcacaactttactaatcggaacaaaagtaaaagttaaatattctcaagaaagcactagctgagctacacacacacacatacacgcacaacatacctttgtggcattcttatagctgggggacttaactggctctgccctctgactgcttgccagacttagaagaaaccgagaaaaagcaggtagaaaaatgtttatgctctaattgcgagtgtggtagctggcgtccctcaagtggaatgtatatgggcttcaaggcttttgaccaacttcactggactttcttagggtcttacctcttttattcgcactgtgggttcaggtatatttatagtatagtgctctgattcttgatcatctcacacctattttgaagtattagcatgaaccacatacaagaaagtcaatagccaaaccttttccattcttcctacagctcttgaaactggcagccttgagaaccacccatttcccttactacctctcacctaagcctttcctggtgcacgatgttaactttacactatgtatattactatttaatgtcgacaccgctgtcttttcatttcacatctgttatgacattgtggctttcgccctttgcggtcagggaccataactctttgacatactgtgttaacagggacttactcaggaacagccatttggctgttcatggggtgtaaaattcactgcagttttgaagctgagaaaagatagcttgaatccttttgtaagttctttggaaaatggacagattcttttttactgataacctatatcatcaccaaaatggacctgtcttataattgactagacctgttaatgaaatgttacagactaatttgagaaataattattgggtgggagaaaagggcatttactagaaaatcaagtaaactttgttatcctcaggtatttaattggaagaattgagcaaaaaatttgttaatgtttagattgatttatgttcctttttctaatcactgtttcctgctaaaaaaaataactgtttggcaaactttctgtaactctctatcttttcctggtttatgtctgttgtcccaggcattctgattacatatcccaatcacaatccttttatatgttagtatctaatgtgatgtggaagaatttgtatggtttacttgaaaattgcctattgtttattaaattccgacagcaagactcttctgcataaatgtttttgggtcttaagatcagatttcaagctggtagtacttcatttccccttaagggaaaggatgtgtaagatatttataaattcaagcatgcttaaggaatttatttaaatggctgctaattctactgcattagaagcatgccattgatatgtactgaattaaatttaaggatatatcatctcaaagtatattctagtaatctttaattagttaaaagtatcttttaatattgttaagtaaaactcattaattgtagaaatgcttagagatgagtttaggctacctaccgatttttaaattaaaacttaattttttaatcactataaataaattagtaaaccttttaaaatataaagttttcttacaatcactttgcrtaattgaatatctcattcttacctagctaatgctttgtgtctcctgtctttttgtttctgttttggcttagtttatttcattgatctctaagctgtcttgtgtggaagggagaagctgcatgacttgctagaagttttacatgtgatggaatttaacctcagtttatgtctctccctgcacagtcccttcagtctgaatatgttcattactaaggccttgccactccagtgaaagctgttcttctcttagacacaatttcttcatctggacgagcagtggagagggaaagcaacttcttgctggaagaatatctctgccttcttaccttaaattaaaaagagcactaagataacaccttcaagagacttgaaaacagaaaactggttaatgactactataaatgcactgaaactatgtttatggagatttccatacttttaaagacagttttaatgttgaatttggtattttgaagggttatttttaatgtattttggtaatacatttattattatatttacatgtacagtgttacattatatatgtattgtgaactttaaaagactattttgataaatttataaatatataaaattatgtaaaaactacactatattttgatttagattttcctgctgtttgctaccaaaaatttgtattttaaatctgtttagttttagtatggttttgtctctaatgaataaataattccttcttattaagaagaagtaagggagaaagtttttagaaagtgatttttatgctcgcactataaatatggcaggtcagttcattcttttgggaagtcagtttarttacactgagtttatccaagtttatctctaccaagagtataatggcatgggatggcttatttaggacaattccctttcccattgtttttgttgctgagccaatttgagttagttttgcatcctggggggctttaaaatacagcatgcagtgaaagatcagaattcactgaatatttcttctgagagcatggtttcatggtttttctctatgaaatgactcaatattccaaatgtttttttttccttcctcctttcaaaagagttcttaacccaattaggatatcctgctttgggtatgaggttgttgttgcctgtaatcacacatggtttgacatcagttttaaatcaatggagagaaaaaactgaaaaagatgctgctaagtagttctctgtattaaaggagatatttttaaaacagggtacaaccccctgctgcacacgctagcatatctggaacctactatgaaaatgaaaggacccttataggtactcacagccctttcatgtaagtatgatctgatatttaggtcttcagaagcctgtaggtttcatttctatgaggaatcgaggagcgttacatcctgatatccttccaggctgcttaagaatggactgcttcgacactgaaagtgctagttaaatggattcatatgaagtgctttactcccaaccattgagttatttataatgtatttattaggggagggtaccttgagtctattatatatgcttcatcaaaacatcttgttcatgttttatgtttttaaaaaaggcatttgaatgaatgtttgactcaggtttgttaaattaaccttcagtaactgcagtaccaaaaattacactcaactgatgaaaaaaacgaattgtatgatttaggaatcaaaaactaaaataagtggaattatgtatcttttctaaagttaaaaaagtaaaatattttattatgagttattataaaaattggttaattgtataggaagatgacagtatttttttcaagttatcataaaaagtaattcagatgacatttgagaagtaggggaaagggaatcatgttgacagttttagttctgtgaacactaatttgtgtgaagctattaaaatgattgtaaagttgactactgtaaatttcccataattatgtgtgtatatgtgtcatatgtatgtacatgtatatgtctaaaaattactttacacatgtgcctacatagacacaccaagaagtggatgtatataatatagaaagtatatagcaaagtaattttactctgataataaaaattgtttgacatgtattttgttatgaatagtttatcttccaaaagatattttgctctattttaaagtgtagaagaatacactgctaataaataataaaagttttattcaatttacttattttttggtgtttataatttgaatttttgagttatcaatgtactgaagtctctttataattttatttttggttcagtgtggtcagtgccttgagtgtttcaagatctctattctggattttagtttagcttttattgactttctaggttgtggccattgcctgaaatacatgacagtgagctcacagaaaccttatactttgaatttcacaaaaatcatataatgttaggttcttgcttgctttccctttattttttttactgtcaataaaatactgatcctgatcagtgttttgggtcctgcttagtcatttatgactactgatgactattgtgtgattgatcaccagttccttttgaaaaagaatgccatttttcctaaatgagaaattatagaaatcagttagaagaaacctcacacctgttggatctatgccctgaaaagtcagtttgggaggaagaagctacactatttattggagatattttatatagtaaactggatctctttgggttatgatgattctgaggtttttttttccttaaattttttttttttttttttttagaatgcaaaggaaagtttgtgggtgagaaggtagttttacatttggaattgggatctgcaaatagctgtcctaacaacactgcatgaaacaattggggtaccaaggttttcataggaccacatcttaaagaaggagatttcttatgaattaatgaacctgtttcacagggcagaaggaaatctttttttgtacagattgggtttttatgaaaaagaaagtaaaaaaaacaaatcaattagctggtttcagcagatttctcacctattgagtttacctgtttcttttttatccttagatgtaaaatgatttataaatctcaaaacacacctgggaaaactatctatgtgattcaaatatagcaggaacatgaatttaccaactatacacaaatgtattttgaaaattgtttttacttctatgctttcttcagtgacatgttaaaccattaatatgttgagtctaattaaaccagttgttagtatataagctgaacaggactccgtgggcttcatgtcatataagaagtctgtactcgttccaaaagtcataaggcagagtcccctttgcaacacttagcaaagcaagaatttggtcactgtatgtctcctcagaagattaattagggacaattccaattacagaagtatataatttacagcagaaaactcctttatttacacataggttgcatagggttgacaactatggcatataatggaaagtagaaaataattgtattaagttattttgagctgaattgaaatgttaatatattcccacccagttccctctctatggattgaattatgataatcatatcaagaaggagaaaaatagcttttctcaagaattttaaacttttctttgctaagtacaagtagaaacttacattaaaagactagttttaatgcgaaatgtatttggaacaggttttaagtggacaaacataaattagctgaacttctcactctgcatgcctcgttttaacctgcacgccaccaaaatcaaagtaaatcacatcaccacttgcggtgtctgctttggtttgaatcaagttgaccatgcatttttgagaagttgtactccaagtgaagaatggggcatggtaataactgtagaaatgactctacctgcaaatatttacattaaaacttaagatttgggggtagtaatctatcaaatatgtagtcatccctccatatccatgggggattagttccaggacctctgcggataccaaaatcagaggatgttcatgtcccttatacataacggtgtggtgtttgcataaaacctatgcacatcctcctgtatactttaaatcatctctagattacttataatatctaatacaatgtaataccatgtaaatcgttattatattgtttaaggaataatgacaaaaaacgtctgtacatgttcagtacagtagagatgcaattttttttccctgaatattttttatccctggttggttgaatctatggatgtggaacctatggatatggatggccaactgtattttctttatttatattatggctgtcttccaaaaggatctgaagtggcttcatagaaccaagcagatgtaccatagggagagtaaataggggctttggacatcgaatttcaagacaactgacactgagacttgaagctgagataaagaggcctctcagacatcacaggagatctgtcctttctttccagactgggcatatttatgccaaacacacagttttagtcaattccaggactcttcattggcactcactttactcagttttgaagaaaagattatctccaagtgagattgccagtcttgatattcagatccccaaaaataattatgtcgagtacgtggaaggacaaaattggaaccagagatcagattactataagaatccatctatctatctacctactactctcctaccaacctaccatataactgggctttactagagctaatgtaagtataacatatgcctttttgtattgggaagttaaataaaacttggaagacacaggggtcccacagacttgagaagaaaggagctgatctttgtaaaaaacaaaaccaaaaatgaataaaacaatggaggagagggagccattttttaaaatctaggttccttacaggcaaagagatattttgttttaaatggaaaaacataaattggataccatacttcaagaagcatgttccaggcagttttatcaactctggaaagaggtaaccagttaacttttcaagcagcttggggttgtaaagtaatgttgcatctgctgagtgtgaccagcaggattggaaagggaggcctagctttttctgatttgaggttttgtgtaatactcacttcctctttctcccttctccacttttcataccaatgagtttcacaagcatagccrccaatcctagacttttcctgctgcttgaggcccagctggtagcttactttaccattttggtgccttcaatgaccaacaactaaatggccgggcaccacgtcagatggcaacactgcacgaactatacagctaacatctgttagcagagacactggtggcaaaatccctggtctcagtctcgtatcacatccccatagagcaccagccccggagttctctttctctcatattgctctggagggtgaatcagagatgctggccctgagatggctgccctgtcatgacaagaagtgggactgctgagtgcaaccttgaaaatctactaagctgacaaactgtgactttagtttgatctattttaaagtcaaatctgttggggcaaattatccttaattaaggatttctgtttaagtgacaagtagttaggattgttaatttttaaggtaaaccaaaagaggaaaagttcactcatctggtctggaggagagatgaaagtcagttactaagtcaggatctaattatttatctaatcaggaaagccctgtgtattgggggcccccaagagcattcccagttttgataatttgctaagaagggctcacaggacccaacgtatagttatacccaagatttatttaaatggaaagatttattacagtcaaaaaatacaaagcaaaatcagcaaagggaaaaggcacatggggtgaaatctggaggaagccaagcaccagcttccacgagtcctctcccagtggagtcgcacaggacacacttaattcccccattagggaggtgtgacaaatgtgaaacattttctaccaaagaagttcgttacagactcagcatcctaggtttctactgggggctggtcacatgggcagccttggaagagcacgatcaaaattccaggcgcccagaaggaaagcaggtattccacataaaccatattgtttacacagtctaggtgcaatgaaccacacttatcattcagaagaagttttatatcagtgtaagggaaccgtttaccagtcaagttctcaggcacaagtcaaagacaaccttgcaagcaagccattcacaagacagtctcaggcctgatttttagatacttttctgtataccctagatcacagccaactaattttgtagtaactaaagcccatgtaaattaatgtgcagttttccctcaggctgttgacgcaaaacctgtgtttttagaaaacttgtttgtggagggaagagttgtgatctaggagacgggaactctgttttgggactccagtgttccagatgggccagagttctggcttctgttttgttttcaaatggataaatttggaagtggtgcagcttccccttataaaacactctactggccacagtaaacctgctaccacccgatgtctacaatattccaacctctttcaggccaaacgagtagcagaaatgcaccaactcatatttgctttaagagataaactagtctcaaaattttgctctcagtatctatgccacctccctgttatttataagtaaaagaaataaaaatgtaagttaatgcagtttttaaaatactgcaatttaaagaaaattaaagatagtaaaaattaaagctaaaaaaagattgcaaaaaagcaggcaacagaggcttttaaaatgatgcacttaaaacgataaaaatataaattaaaatgatacaacatttctagaaatggatacatcttagggctatgagaagatagcatatagattacttacagatttgtagcacttagtaccttgtttggcctacagtaattgaataattaaagttaccccaaggcttaacagcttttgcaagtctacagatgccaagccgtcaatctaagtgggatcattttgagctgacaaaatgtcttgctcataggtcatgtccttagactcttctgcctggggattttgattcacaagaggagtccagggtatctcactcttgggattaggctaagtggaaggtctgtgggcatctgtaactttctctgcacaagtatccctcttgcttaggaatgttttaaacttttaattattttttatgttttattttttaaaaaccaagttctaaaaaatttgttcttaccttttaagtcaccttcttacatatttgcacatgccacataaagtcaatcctttcagtagtcagcttgctttccaccttcttcaggaagcctttctcactctgggtttggcaaagtataatttttttttctctcactaagctgtgacatccttaattagggttgtatgccttttattgctgtaacccacgtaactgaaacataataagcataggttaggcctttttaaaaattccactttgtatttcttttcacattttatctgagttcttcagaaatggttacatagattcattttctttttttttttgagacggagtctcgctctgtcgcccaggctggagtgtagtggcgccatctcggctcactgtaagctccgcctcccgggttcacgccattctcctgcctcagcctcccgagtagctgggactacaggcgcccgccactacgcccggctaattttttgtatttttagtagagacggggtttcaccgtgttagccaggatggtctcgatctcctgacctcgtgatccgcccgcctcggcctcccaaagtgctgggattacaggcgtgagccaccgcgcccggcagattcattttcttgagtggagctctggccattacatctagagttctggtttgggaaagcttcctacggggagcagaacttcgaacaagctgtattgggaaagattcggggaggtttaacgggctactgcctctggtgggggacattgctggttcagaaaaaattgacacagtgggaagggaataaaatataagaactcatatttacccacacagattggaaagttgactgtggattgatattcagtccctcattcagcaacgtttattgaaagaccactgtggagcaacagacacaaagttaaaac

SEQ ID NO: 95583 - DNA, 68899 bp, Homo sapiens
atgtacattcaacagacacatggaggatgaaaaggaaacagccatgcaaagagttcaggggaaagactggcccaggtgaagagaacgccaagcacaaaaaccctgaaacaggaaaaagtttggtttgacaatggaattgccgaaaggctggtgtgactgaagtattgtgcgtgaaggagtagcaacagatggagtcaaagaaatagacaaaggcggtggggcatggtggctcatgcctataatcccagcactttgggaggctgaggtgggcgaatctcgaggtcaagagatcaagaccaggccaggcacggtggctcactactgtattcccagcactttgggaggctgaggtgggcggatcacaaggtcaggagttcaagaccagcctggccaacatagtgttaactctgtctctactaaaaatacaaaaattagccgggtgtggtggcatgtgcctgtagtcccagctactcgggaggctgaggtggtagaatagcttgaatctgggaggcagaggtggcagtgaactgagaccacgccattgcacttcagcctgggtgacagactgagactccatctcaaaaaaaaaaaaaaaaaaaaaaaaaaaaagatcaagaccatcctggctaacatggtgaaaccccatctctactaaaaatacaaaacttagccgcgcgtggtggtgtgcacctgtagtcccagctactcgggaggctgaggcagatgaatcacttgaacccaggaggtggagattgcagtgagctgagatcgcgccactgcactccagcctggtgacagagtaagactccatctcaaaaaaaaaaaaaagaaataaatagacaaaggccagatcatgtagccgtttacaggatatggtaatgattttgttttttattctaaatgcaatgggaaggccgggtgcagtggctcacacctgtaatcccagccctttgggaagccgaggctggcgaatcacctgaggtcaggagtttgataccagcctggccaagatggtgaaatgctgtctctactaaaaatacaaaaaatagctgggcgtggtggtgcacgtctataatcccagcgacttgggaggctgagggaggagaattgcttgaacccaggaggtggaggttgcaatgagctgtgatcacgccactgcactccagactgggtaacagagtgagactccatatcaaaaaaaaaaaaaaaaaagaatgcaacgggaaactattgaagattttcagctggtgtcgttgtctgattatgtttttacaaagatcactgctttgtcagtgatggtttgcagttaaaacagaaataaaaggctgggatcacacctgtaatcccagcactttgggaggccgaggtggttggatcacctgaggtcaggagttcaagaccagcctgaccaacatggagaaaccctctctctactgaaaatagaaaaattagccagttgtgatgatgcaagcctgtaatccccgctactcggtaggctgaggcaggagaattccttgaatctgggaggtgaatgttgtggtgagccgagatcgcgccattgcactccagcctgggcaataagagcgaaactcggtctgaaaaacaaacaaaaacagaaataaaaattaaaaagacaatagagaaaataaaccccaaatctcaagaatgagaaagaggacatcattgtggatcctacagatgtttaaaagatattaagggccaggcgtgtgtggtggcttatacctgtaatcccagaattttgggaggccaaggtgggtgggcagcttgagctcaggagttggagtacagcctggccaatatggctaaacgccatctctacaaaaaatacaaaaattagctgggtgtgttcgcgcacgcctgtggtcccaactacctgggaggctgaggtgggaggatggcttgatcctgggaggggaaagttgcagtgagctgagattaggctgcactccagcctagataatagagccagaacctgtctcaaaaaaacaaacacaaaaaaaacaacaaaaaaaagaaatttgacaatttatatgaaatggaaaaataccttgaaaaattcaaccaagactgacatagatgaaacagaaaatctgtgtagccaattaaagaaagtgaggccaggcgtagtggttcatgcctgtaatcccagcactttgggaggccaaaatgggaggatcacttgagcccaggattttgagaccagcccaaacaacatagtgagaccctgtgtctgcttttaaaaatatacctggacatagtgatgtgcacctatagtctcagctacttgggaggctgaggtaggaggatcaactgagtctagggaggtcaaggctacagtgagttgttattgcagtactgcattccagtctgggtgacagagtgagaccctgtctcaaaaaattaagaaattgagggccgggcgtggtggctcacgcctgcaatcccaacactttgggaggctgaggcgggtggatcacctgaggttgggagttcgagactaccctgaccaacatggagaaacctcgtctctactaaaaatacaaaattagctgggcgtggtggcacatgcctgtaatcccagctacttgaaaggctgaggcaggagaattgcttgaacctaggaggtggaggttgtggtgagccaagatcatgccactgcactccagcctgggtgacagagactctgtctcaaaaacaaacaaaaaaacccttagatggtaacagtaacatcatagatgacccagatatcctttgaaaaaaaacaaaaaaaacacaagtactttcatttaaaaagatacggcagtggccaagcacggtggctcatgcctgtaatcccagcactttgggaggtcgaggcgggcggatcacaaggtcaggagatcgagaccatcctggctaacacggtgaaaccccatctctactaaaaatacaaaagattacccgggtgtggtggtgggtgcctgtagtcccagctacttgggaggctgaagcaggagaatggtgtgaacccgggaggtggagtgtgcagtgagccgagatcacgccactgcactccagcctgggtgacagagcgagactccgtctcaaaaaaaaaaaaaaaaaacctttccacaaagaaaaccccagggctaggtagtgaagtgtactaaatagctaaggaataatctcagaaacttctagaaattagaagagagcacttcccaactcattttatgatgccagtataaccctgatacccaaaccccacaatgctgttataaaacagaaaattacaaatcagtatccttcaagaacttagatgggctgggtttggtggttcacacccataatcccagcactttgggaggctgagttgagaggattgcttgagcttaggagttcaagaccagcttgggcaacacagcaagagcttgtgtctactaaaaataaaaaaataaattagctgggtgtgatggcacactcctgtagtctcagctacttgagaggctgataggggagaatcacttgagcctggcagatcgaggctgcagtgagctgtcattgtgccacagcactacagcctgggtgacagagcaagttcctgtctcaagaaacaaaacaaccaaaaaaccaacagatggaaaaattcttaacaacagagcaaatcaaatccagtaatacataaaacgtttattatgtcatgaccaatttgggtttatcctaggaatgcaaagttttttttaacattgtgaaatcaatggtaaagcttctcataataacagaataaaggagaaaaaccatacagtccttctatagatgcaataactgcttgacaaaatccagcatttattcgttatcaaaatgaatcatatttagaacaaaggggtcttcctcaatctaataaaggacattttggcagagtatacctttatactttccaacaatgaccagaacacatcccaattcatatggttttatttttttttttagatggattctcgctgttgcccaggctggagtgcggtggcacaatcttgctcactgtaacccctgcctcccaggtccaagcgattctcctgtctcagcctcccaagtagctgagatcacaggcatgcgccaccatgtctggctaatttttgtatttttagtagagatggggttttgccatgttggccaggctggtctcaaactcctaacctcagatgatccttccgcctcagcctcccaaagtgatgagattacaggcgtgagccaccaggccccatatgcttttcttatgtgtcgttgacactcatcccatcaagaggtaggaactgtgttccccttcccttgaatctggctgagtgggcctgtgactaccgtgatgttatatcacttgcaaaggtaggtcataaagctgttgatatcagggacaaatactaatagaataactcccattccagtgtgtacatatttgaaagcccatgtacatgataaatatattaactttttgccaattttttttttcttttagactgagtcactctttcacctaggctggagtacagtggtgtgatctcagctcactgcaacctctgccttccaggctcaagtgattctcctgcctcggtcttctgagtagctgagattacaggagtgcaccaccacacccggctaatttttatatttttagtagagactgggtttcaccatgttggccaggctggtcttgacctcctgacctcaagtgattcacccgcctcggcctcccaaggtgttgggattacaggcctgagccaccgggcacccggcgcattttatctatttaaaaaatgaataacaaaaatcaggataacagttataccactgatatttaacatggctctggatgttcttgtcagtgcctccagatgagagaagtatataaatatcaaaaatcggtgcacaccactgtgcccagcaaggaaacatcttttaaaaatgggagacaccaggccatattagaggctcaatccaatagtgagggcgaggctgatgatacaagagaataattgaagaagcgatgcccttgagaatgcttgaagccctgggatgccaagtgcaagtggagcgattgccctttaaccagaagaacactttgtctgctattgaaaaaaggtggaaagaggttatgaagaatggtgcagatattagaagttttgtagaatttttttttttggagacggagtctcgctctacccaggctggagtgccgttgcaggatctgcaatctccacctcccgtgttcaatttattctacctcagcctcctcccgagtagctgggattacagacgcatgccaccacgcccggctaatttttgtatttttagtagagatggcgtttcaccatgttggccaggctggtctcaactgctgacctcgtgatcctcccgcctcagccttccgaagtgctgggattacaggcgtgagcctccatgcctggccagaagttttgtagatttagccgtggcatgatcaaggagttcctatccgacagtttctattttctcaataagttttctgaaaaaaaggggagaggctgtttcccagggagtgcacaattctgaaggctaaccaggggcgcctggttttgggcaactacaaatgtggttgtgttcaaactaagcgtgtaaaggttgtgttcaaactaagctgggcgcctgtagtcccagctacttgggaggctgaagcaggagaatggtgtgaacccgggaggtttcggacacgggttggagtgtcaagagagaaggcaggagcgtttagtctgcttcagatatgaagactccctgtattcccagtcctaagcaagggagcaaaggcaggggacagagccctgctgctcaggtgaggggccccacgtggaacgcgccggcgcgggaggggcggcctggcgcaggtcatttgggacatctgcgggttggcgcatgcgcgcgaggtgcgcaggctcgcgcctttttcccttttctaagctttctgtgttacccccggttccgctgtcttttctgtctacagtttgcgatccccgcgtccaggatggagcagctgaacgaactggagctgctgatggagaagagtttttgggaggaggcggagctgccggcggagctgtgagcggagaggggggagggtgtgggaacaaagmgggagatttgaaagaaggagcgggagaggctgcgtccgcaccgcctcagactgaccgggcccggggcccagggacccggtgcagctccctgggcacccgaygagcctccggagtcggggcctgcctcccaaggtgttctttggggccacattcagccagagcctggactctccctcgccsagcagttcattgtttcccttgatttcacctctctccctaagttgaggagtttcggccactggaatgtttttataataggaaattgcaaccgccgwaggcttttctygatgtttagttggattaacttatccttgggggatctctgcaccctcagcatggtgtatataaatgatcagaggaagttaaccacggtcataatgtggaattactttcaatattatagcaataatgctaattagcgttgagggacttttgcgtttgggcttttgatcagcaataccttttgagaaacatctttaaggcatcatagccaatcttgcgaaattcatggcctgaggttaggtggactacaggaataaagcgtttgcaaaataatagaacctacggtcaggtaacaaaagataacttgcagtgtaatgtgaaaggcgtttggtgttatcactggagaggtaatgactttggaccctcctttggtccctcactgatgcctcartcaaacggggaagacttaagaggtacttaataggagaagggctgttttcttgagagattattattttgcataattttagacagcttggaccgatggatgaaagtattgacaaattgacttacccactataaatataagtaataaagttctgaattactctgtaaaggattgagctaaatcgataggtattaagcctgctttctgtccagtgagattttatcgaaagatttccggcattackttagcaggttggactaaattatttctaagtacaattctgtggctcatgataggactttcagtgaaccacggacaatacccttttccgtaacataagtctcatatttacaaaaaggatcgtgtccaaaacatctccttttacttgtactttgggaaggcttgcaccagtggtagaaatttcttgtttaatgttgtccaatttatactttcctttcttttttctccgccagaaccggggtctttttctgtcgctcaggaaggggkgcagtagcatgatcgtatctcactgcagcctcaaactcctgggctcaagcagtccttccacctcagcctcttgagtagctgggactacaggtgtgcgccatcatgcctggcttccagtttattcttaatcctcattgtaatgagtgtcccacagaacgctttacagaaattaaaatggaaaatctcatatcatgagcatgtttgaaatggcattacttctgggaagtttttataataggaattcttctgtgtctttgctctcttaattttacctattttgtctaaatgtcattgcaataagcttttcagaagaaagaaacctagaaaactggaagattggtttgtagataaaacatattggatggcttcttatttcatggttgtgctaaaatagttttgtatgtgtgtgctttagatttcagaagaaagtggtagcttcctttccaagaacagttctgagcacaggaatggataaccggtacctggtgttggcagtcaatactgtacagaacaaagagggaaactgtgaaaagcgcctggtcatcactgcttcacagtcactagaaaataaagaactatgcatccttaggaatgactggtaatttttatgtgactttgagcaccgatttgaatcttaagggtactgtcgtaaaactcatcaaatggcttctgtgaatgttactataatttaattgtttaaaagggagtaggtttgatcttagcctaattctgcatgaaaattgtatctattactcctgtatctcaagtctcatattccaaaaattgacttttgttgtcatttgaaaatcacgtgggccaggcatggtggctcacacctgtaatcccagcactttgggaggccaaggcaggcggatcacctcaggtcaggagtttgagaccagcctgaccaacatggagaaacccagtctctactaaaaataaaaaaaaattagctgggtatggtggcacttgcctgtaatcccaggtactctggaggctgaggcaggagaattgcttgaacctgggaggtggaggttgtggtgagctgagatcatgccattgcactccagcctaggcaacaagagcgaaacttcatctcaaaaaaaagaaaagaaaatcacgtacaaaggaccttattaatgactacttcctatttcccagtacattcttttttttttttttttttttgtatttttagtagagacagggtttcaccatgttagccaggatggtctcgaatcccctgacctcgtgatccgcccacctcggcctcccaaagtggtgggattacaggcgtgagccaccgcgcccggccttcccagtacattctaagattgcagtttaaacacatgttagttttaactaaaagcaaaattaattaaaacatatggacattcttaggccttagatttctctacccaaagtgtggtatgtgaggggtggagtgtagatgcagaaaagctagaggtctaactttgactcttcgtctaagccgtgaattaatttgttttttgttgttgtggtttttggagacggagtcttgctctgtcgcccaggctagagtgcaatggcgtgatcgcggctcactgcaacctccgcttcctgggttcaagcgattctcctgcctcagcctcacaagtagctgggattacaggcgtccgccaccacgcccggctaatttttgtatttttagtagagacrgggtttcaccatgttgcccaggctggtcttgaactcctgacttcaggaatccacctgcctcggcctcccaaagtgctgggattataggcatgagccaccgcgcctggcctagtttcaactagttcagtttgattttattcttgctacactggatttggcttcatgcttcaagacttatacaagctgtagatttcctaaaagtcttaagaaagagtaaattattaaaacaacccaattcataattggagctatatattacattagcaaaggttttttgatagcttttgcaatagactttactggcactaagttgttttccctttgggatttatagaagacccttgagtattctcagatgtgtttgacacatagaaaggggtagaatractaggggttgttttagaagactgtatcctgctatttgatttttttttttaaagacccagaaatttagaaatatttttttcttcttcagataaaatactcatttatttttttgaagcctccctaatacgtttacatgtaggaacctaagctatgtatttatactttaactttgctttattttcaggtgttctgttccagtagagccaggagatatcattcatttggagggagactgcacatctgacacttggataatagataaagattttggatatttgattctgtatccagacatgctgatttctggcaccagcatagccagtagtattcgatgtatgagaagagctgtcctgagtgaaacttttagggtaaataatagtaacagttaatgtttctgcagggtctgagagttttacagagcacttttacatttattatttcacttaatcctcccagcaaccctataaaataaatggtattaattagctgcattttatagatgaggaaaatgggctcagagaggtgaagtgacttgccccatagccacataactatgaggtggcagtgctaggactaaaggccaggtgcctgagtccttcgaatcttgttcagggcttaataaaataactaattataataagaaaattaatttaaatgataaacttttaaatttaaacacacctagacatttccaaagttggcttcatgtgattcccactaaactaaaaataaatgtgcaaactgcttttaaaaaatgtattttgctagaaaaattagccaggtgtggtggcgtgcacctgtagtcccagctactcaggaggctgaggcaggagaatcgtttaaacccgggagatggaggttgcagtgagccgagatcatgctactgcagtctagcctgggcggcagagcaagactctgtgtcaaaacaaacaaacaaaaatgtattttggactatttcaaacatacaaagagatgattgtaataaactcccatgtactcaacacccagctttttatttatttttcttgaaacatgcagttttattttaaaataaaaagtctcaaaaaaaaaacgtattttggggctgggcgcagtggcttacgcctgtaatcccagcactttgagaggccgaggtgagcagatcatgaagtcaggagttcaagaccagcctgaccaacatgataaaaaccagtctctactaaatacacaaaaattagccgggcgttgtggtgcgcgcctgtaatcctagctactcgagaggctgaggcagaattgcttgaaccctggaggcggaggttgcagtgagctgagatcccaccactgcacttcacggtgggagatagagggagactccgtctcaaaacaaacaaaaatgtattttgggctatttcaaacatacaaagagatgatcgtacccaacacccagctttttatatatttttcttgaaacgtacttttattttattttgagtctcactgtgtcacccaggctggagtgcagtgtgtcactgaagccttgacctcccaggccacctcagcctccctagtagctgggactataggcatgagctactgtgcttggcctgaatattaagttttaaaaaactttttggaccgggcgcagtggctcacgcctgtaatcccagcactttgggaggccaaggctggcggatcacgaggtcaggagatcaagaccatcctggctgacatggtcaaaccccatctctattaaaaatacaaaaaaattagccgggtgtggtggcgggcgcctgtagtcccagctactcgggaggctgaggcaggagaatggcgtgaacctgggaggcggagcttgcagtgagcaaaagtcgcgcggctgcactccagcctgggtgacagagcgaaactctgtctcaaaaaaaaaaaaaaaaggtctaggctaatacaagagttaatcaagaaatgtagtgtttctttttgagtggagaaaaattccttgccaaaaatctctgctgtaggttaaaaaaattttttttcttcccaaacattactgctaagtaggtttacattttatgtttgaatggtatcttttacttacatgagtttatcagctatgcctttattgacttttctattgggtggattatcaagtgaaataagagaacaatactttaaatattaattatttgagaatattttgaattttaaaatattggttattttaatttttttcaaaatggagaacattgattttaaaagtaattcatatcagcctggccaacatggtgaaaccctgcctctactaaaaatacaaaaaataaaagttagccgggcatgatagcacacacctgtaattccagctacttgggaggttgaggcatgagaatcatttgaacctgggagatgaaggttgcagtgagctgagattgtgccactgtgctccagcctgggtgacagagcaagactctgtctcaaaaaagaaaaaaaaaaggataactcatacagtaattcagacaattctggatagaagaaagtgaaagtcacttataattccacgcaccagaaaaaaatttttttaatattttggcatttgtcttaccagtgcattttggctatggtggtttaatagattaggtaataaatatacaattgtgtctgttaatatgttgtgaaataaactgtgtgatttgcttttgtagagctctgatccagccacacgccaaatgmtaattggtacggttctccatgrggtgtttcaaaaagcmataaataatagctttgccccagaaaagctacaagaacttgcttttcaaacaattcaagaaataagacatttgaaggaaatgtaagtagttataagaagaactgcaggtataattttattatataacttctgtcctagaaactataaagtatttgtgtagactatccaatataaattagtgtaatctaaaatgcagatttcatagttstagtacattgttggaactctgtgaagagtttctgaaattgctcaacaggaactttttgggtaaaaatacctaaatattttgtacatgtgcataacagattccttaagtactttcagagaatgtataaagaacttttttgcattagttctagaaacagtgtgatatactgagaattatatggggttgggaagaagatgaaactggtttcaaagtgcatctttacggccaggtgcggtggctcacgcctgtaatcccagcactttgggaggccgaggtgggcggatcacgaagtcaggaaatcgagaccatcctggctaacatggtgaaaccccgtctctactaaaaatacaaaaaattagcagggcatggtggcaggcgcctgtagtcccagctactcggaaggctgaggcaggagaatggtgtgaacccgggaggtagagcttgcagtgagccgagatcacaccactgcactccagcctgggtgacagagcaagactccatctcaaaaaaaaaaaaaaaaaatgcagctttacagtattttttttttggaggggagataggggtcttgctatgttgtccaggctgtactcaaacgactgggctcatgtgtttctccccacctcagcctcctgagtatctggaacaacaggtacatgccaccatggctggcctgccttaccagtttttttttttttttttttttttttttttgaggtggagtttcgctcttgttgtccaggctggagtgtaatggtgtgatctcaggtcaccacaacctctgcctcccaggttcaagcaattctgctgcctcagcctcccgagtagctgggattacaggcatgcaccaccacgcctggctaattttgtatttttagtagagacggggtttctccatgttgaggctggtctcgaactcctgacctaggtgatccgcctgcctcggcctcccacagtgctgggattacaggcgtgagccactgcgcccggcctaccttaccagtttttgttttgttttgttttgttttcgagacggagtcttgctctgtcacccaaggtggagtgcggtggcttgctcttggctcattgcagcctctacctcccgggttcaagcaattttcctgcctcagcctctcgagtagctgggattacaggcatgagccaccacacccggctaatttttttgtacttttagtgaagacggggtttaaccatgttggccaggctggttttgtactactgacctcaagtgatccacccaccttggcgtcccaaagtgctgggattacaggcatgagccaccaggcctggcctaaaattttgatacatattaccaaattgctctctatagacattgtccaagtttacatttctactggcaatatatgagactttgtgagaccatatggtcatctacatcatttttaatcaactggaaactgcctgatttcaaacagccttttgcaaggataaccttcatcttcagtactctaaatgtgtgtttctctagatcttttttggatgctttggtattagcagttgctttctggcttgaggaatttcagcttctctttcaacctgtggttgctattttgtttaagtcaattttggcagagctagcattgctaattttgtcttctctgttggaccggctctctcagagggctgacacaactctgctctgtcagtcttggtaagctggaggtggcagaaacctaggaaagtaacagcttattaaatttggtgtttaatattgcacagttatatggtaaatgtgtattatcctgaagtctcaatgtctgatgaatgtgttattatggtgctcccttaagcaagtgagaaaaattgtaagttgtatcttttttttttttttttgagatggagtcttcctctgtcgttcaggctggagtgcagtggctcactaggctcactgcaagctccacctcctgggttcacgccattctcctgcctcaccctcccgagtatctgatctgggactacaggcgcctgccaccacgcctggaatagtgctgacctatagttagcactgtatttatggttatcatcatggtctttacatctttttttttttttttttttgagatggagtctygctctgtcccccaggctggagtgcagtggcacaatctcggctcactgcaagctccgcctcctgggttcacgccattctcctgcctcagcctcccgagtagctgggactacaggcggccgccaccacgcccggctgaatttttgtatttttagtagagacggggtttcaccgtgttagccaggatggtcccgatctcctgacctcgtgatccacccgcttcggcctcccaaagtgctgggattacaggtgtgagccactgcgtccggccaggtctttacatcttaatgatttttttttttctttttgaatctggctctgtcgcccaggctggagtacagcaccgtgatctcrgctcattgcaacctctgtctcccaggttcaagtggttctcctgcctcagccttctctttagctgggattacaggcgtgtgccaccatggccggctaatttttttgcatttgttagtaaagatggggtttcaccatgttggccaggctggtctcaaactcctgacctcaggtgatccaccctccttggcctcccaaagtgctgggattataggtgtgagccaccatgcccagcctatactttaatgagggcttaccatcagctaagtgctttacatacattgttctatttaatcctcagactgacactgtaaggtagttattatctcctccttacagatgaggaaacaggcttaattaaccgtgacttgctcttagtcatacatctggtagtgcagagttaggattcaaacctaggtgtgaytttatatacaaactgataagcccctaccaccctagagtagttattaagattgcggagcttaaacataaagaaggaactggaataatcatcctgggagggtaagtttataacagcagttctcaaaacttttgctctcaggacccctttacactaaaaaattattaaagactggaaagagcttttgtttatgtgggctatatctatgattaattactgtactagaaagtaaaacatgtttattaattcatttgaaattaacatgtatattcatttttgctgtggttgttattgagacagtcttgctctgtcacccaggctggattgcaatggcatgacctcggctcactgcaacctccacctcctgggtcaatcaattctcctgcctcagcctcctgagtagctgggattacaggtgcctgccaccacacccggctaatttttgtgtttgtgagtagagacagggtttcaccatattggccaggctggtcttgaactcctgacctcaagtgatccactcgtcttggcttcccaaagtgttgggattataggtatgagccactgcacctagcctaaaatgtatttcattcaaaaatatcaatctatgcttgttaacataacattttaatgaaaaaactattgtaaaaaaatgtaatgaatgtcattgttttacatttttttcagtttctttttgctttctttcttccttatttattttttttgaggtaaggtgtctctctgttgcccaggctggagtgcaatgatgaaattatcacccactgtagcctcaaacaatcctccagcctctattttttttttttttttttttttttgagacggagtttcactcttgtttcccaggctggagtgcagtggcatgatctcagctcaccgaaacctccgccttccgggttcaagcaattatcttgcctcagcctcccgagtagctgggrttacaggcatgcaccaccatgcctggctaattttgtatttttagtagagatggggtttctccacgttggtcaggctgatctcaaactcccaacctcaggtgatctgcccatctctgcctyccaaagtgctgagattacaggcatgagccacagagcctggccattttttttctttctttcttaaagctacagcacccartattcccaggtggtctcccatccaagtagtaaccaagctcaaccctgcttagcttctgagataagatgagatyggctgcgttctgggtggtatgggtgtagaccaagcctctatttttgcaaatgttttaaatgtatgacttcatataagatcgtggattcttgtatctgcttctgcattcaaaatatttctatgttttatgtcatgtaccctcagaaaattcaactgtactcttatgaaaggaaaatgataaaaaatgtattcatattgttacgacataattttgaccttgtaagaaccctgaaaaattgagacttagtttttttgtttctgtagatttctcacataagaagttaacattcctatatactgtcctttcatgttgtaaggctgatactgcctttctgtccatatgacccttttttctcttttacatttctactttccattgcttggtttcaggagcaatatctccatttttttaatcccaaaggtgtaactgggactcttccaattagaccatggtatgaattagagcaaattatctgaaatttgatgtcatgtcactgtttcagtgttatttkgatttttttttttttttaaacagggtctcactctgtcacccaggctggagtacagtggtgagatcacaggtcacgtaacctcaaacttttgggctgaaacgatccttccgcttcagcctgctgagtagctgggactatagtttcacaycaccatgcttggcgttatttggatgttttttaaaaattgtggttaaatgcacataaaaattaccgtgttaggccaggygcaatggctcacccctgtaatcccagcactttcagaggccgaggcgggcagatcacgtgaggtcaggggttcaagaccaggctggccaacatggtgaaaccccgtctttactaaaaatacaaaaattagctgggcgtggtgtcatatgtctatggttccagctactcaggggactgaggcaggagcatcatttgaacctgggaggcaaacgttgcagtgagtagagatcgcgccagcctgggcaacaagagtgaaactctctctcaaaaaaaaaaaaaaattacygtattaggtcaggtgcggtggctcatgcctgttatcccagcactttgggaggccaaggtgggcagattgcttgagcccaggagtttgagaccagcctggccaacatggtgaaacccaatctctactgaaaatacaraaaaattaccttagcatggtggtgtgtgcctgtaattccagctactctgaaggctgagtggggagaatcacttgagcctataaggcagaggttgcaatgagccgagatagcgctactacactccagcctgggtgacagcgtgagaccctgtctcaaaaaataaaaaaagaaaagagaaaaagaaaaagaagaaaaaaaattaccatgttaacttgtatgtgtgtgtgtgtgtgtgtgtgtgtgtgtgtgtatttgtgatggagtcttgctctcttgcccaggctggagtgcactggtgcgatctcagctcactgcaacctctgcctcctggattccagcaattctcctgcctcagcctcccaaggagcggggattacaggcatgcaccaccatgcctggctaatttttgtgtttttagtagagacagsgtttcaccatgttggccaggcttgtctcgaactgctgaccttgtgatccacctgcctccgcatcccaaagtgctgggattacagatgtgagccactgcgctctgcccatgttarccatttttaagggtacagttcagaggcaaagtacattcaccttgttgtacagccatcaccctrtctatctccagaactctttgcatcttcccaaactgaagctttgtgcccttgaaacaataacgctcccttctttcctcctcccagcctctgacaacccccattctactttctatctctgtgattttcactactgtaggtacctcatatgaatattagtccttttgtgactggcctatttcacttagcgtaatgtcctgaaggttcttcaatgttgtaacatatgtcagaatttccttcctttttatagctgaataatactgcattgtatggaatatgccacattttgtttatccatttattggctgacgaacagttgggttgcttatatgtatttttttgtcctcgtttacttttctcatatttatactttcatattcgctatcatatttttggcaggtaccgcttaagtctaagtctatttactattatatttttggcaggtaccgcttaaatctaagtcaagatgaaataaaacaagaagtagaggactatcttccttcgttttgtaaatgggcaggagatttcatgcataaaaacacttcgactgacttccctcagatgcagctctctctgtaagaaacacattttgtttatatatatagtcttcatatttttagaccaggatgccattctgtgtgttgaatcaaagtttttaaagattgagtaattacaattagccattttgcttgcttattttataaattatggtcctaagtatctttccatgacaaaaaagaacccagtgaatagaaaattttattttcattattatgatagcttattttctatatgtagatatgtattttctttttctttctttttttttgagatggagttttgctctgtcgcacaggctggaaatacagtggcacygatctctgctcccggcaacctccgcctcccaggttcaagtgattcycctatctcagcctcccaagtaggtgggattacaggcgcctgccaccacacctggctaattttgtatttttagtagagacagggtttcaccatgttggctagactggcctcgaactcctaacttcaggtgatccacccgcctcagcctcccaaagtgctgggattacaggcrtgagccactgtgcccagcctctttcttcttcttttttttttttttcttttttgatacagagtcttgctctgttgcccaggctggagtgcagtggcatgatttcggcttactgcaacctccgcctcccggggttcaagcaattattctgcctcagcctcccaagtacctgggattacaggcgcccaccaccatacccggctaattttttgtatttttagtagagacagggttttgccatgttggccaggctggtcttgaatgcctgacctctggtgatccacacaccttggcctaccaaagtactgggattacaggtgtgagcaactatgcctggtctgtattttcttataaagtaatcaatttataaatattctgggggtcctaatttttatcatttgattctttttttttttgagacggagtctcattatgtcccccaggctggagtgcaatggtgtgatctctgctcactgcaacctccacctcctgggttcaagcaattctcctgcctcagcctcctgagtagctgggattacaggtgtgtgccaccacacctggctagtttttgcatttttattagagatgaagtttcaccatgttggccaggctggtctcgaactcctgacctcaagtgatcctcccaccttggcctcccaacctgctgggattacgggcatgaggcactgtacctggcctcatttgattctttcatgtgtatttttctgtgttactagcatatagtctgtgtcatgtgttgactgtcatatggatgtgctatatatttactgtgtttagccatttaatgctgtttggcattatgtgtattttcaagttttttttttttttttctcaaagtggcattgttataattttataggggaaatatgtttttttctgttattcatttagcaaatatttattgggtgtctaatatatgccaagtaatgttttaggtgcttggatcatggtagcaaaaaacaaaacaaaacatacaactgcctactttgtggagtttctataccactgtacaagtaaacagcaggggaccagactgtgattaatgcagtgccgaacaatgaggaggataagaagaaagggagaataggtaggtagtggtggcagggatattccatagaatgttcatggaaggccttcctcataaggtagcatttgagcagaagcttaaaggaaatgaagtagtgaaccgtacagctgtctgtaggaggaatgttctaggtaggggaaacggcaaaagccctgtggctgacacatactagctgtgtgtgcagtatctcagcgaactagtgtgatggctagagcaaagtgcagtaggagaagagcagcagtagttcccctggagccttatcatcctggtcaggacttggctgctgctctgattagaatggaagccattggagggtttttatctgatttccatttttttttttttttgagatggagtctcgctctgttgcccaggctggagtgcagtggcgcgatcttggctcactgcaacctccgcctcccgggttcacgccattctcctgcctcagcctcctgagtagctgggactacaggtgcctgccaccatgcctggctaattttttgtatttttagtagagccggggtttcaccgtgttagccaggatggtctcgatctcctgaccttgtaatccgcccaccttggcctcccaaagtgctgggattacaggcgtgagccaccgtgcccggctcctttttttttttttaaactggcagagttttatttttctttaaataggcacgacttccatgtatactaatattctcaatgttctctcaatattttcaatattttataacattttgtgatctaaaaaatttgctttaagggggtccgggcatggtggctcatgcctgtaatccctgcacttttggaggttgaggcactgtatcaactggctcaggagtttgagaccagcctggccaacatggtggaacaccatctctactaaaaatatgaaaattagccaggcgtggtggtgggtgcctgtaatcccagctactcgggaggctgaggcaggaggattgcttgaactaggaggcagagattacagcgagccgagatcgtgccactgcactgtagcctgggcaacaaaacgagactccacctcaaaaaacaaaaatgctttaagatttgtgagtcacaaagctttgcagtagttagttctttggacctattccctgtggttcgaatgatataatgagcctggatgtgaatcccagtttggctgtaatttagctgtataactacagcaggctccttaacttgtgtgtgctagtttctgccttgatctcatttacttttttttttctctctctgttttgagacaaggtctcactcttgcccagactggagtgcagtggtgtgatttaggctcactgcaacctctgcctcctgagttcaaacagtcattccacctcagccttctgagtagctgggactacaggtgcacaccactttgcctggctaatttttgtattttttgtagagatggtgttttgccatgttacccaggatggctagtctcgaactcctggactcaaatgatcctcctgccttggcctcccaaagtgctagggttacaggcgtgagccaccatgcctggccctctaatgggattttcacatgtattttaaaaatatttagtagtttaaaaaaaggcttgtcttgctgttagagttgagttttttgtttgtttgtttgtttgttttgttttgtttttgagatggagtctcgctctgtcgctcaggctgaagtacagtggtgcaatcttggctcactgcaacctctgcttcctgggttcaaatgattcttgtgacacagccccctgagtagctgggactataggcatgagccaccacgcctggctaatttttgtatttttagtagaggcgaggtttcaccatgttggccaggctggtctcgaactcctgacctcaagtgatccacccacctcagcctcccaaagtgttgggattacaggcatgagccactgcgcccggctgagtttgttttttatattttttatttctgtagtggtcataaatttgccaccagctccctacactaagaaaaaagctagagtgaatagattgtttagtttttcttgtgttttaaaaataaatttataaatgtttcattttttgttatttctttggaacagactgacataggggttggatattgggcttcactgtgataaactgtgtttatcaagtagtcatccttcacctagttccttgctttgctttataacattctggtctctgtgaatgttctgtaacactaagaaagttaattttatcggcctggcgtgatggctaatgcctgtaatcccatcactttgggtggctgaggtgggcagatcatgaggtcaggagtttgagaccagcctggccaagatggtgaaaccccgtctctactaaaaatataaaaattggccaggcatggtggcggatgcctgtaaatcccagctactcgggaggctgaggcaggagaatcgcttgaacccaggaggcagaggttgcagtgagctgagttcatgccactgcactctagcctgggtgacagagcaagattccatctcaaaaaaaaaaaaaaaatcctaattttatcttcaactgctcctaattatttatcctcatttaccctccttcctcctccctccttttttccccctccttcctcctttatttctttttgtcatttacatttgcttgaaatttattattttttttgagatggagccttgctctgtcacctagtctggagtgcagtggcgcaatctcggctcactacaacctccgcctcccaggttcaagcgattcttctgcctcagcctcctgagtagctgggattacaggcgcctgccaccatgcctggctaatttttgcatttttagtagagacggagtttcaccatgctgaccaggctggtctcaaacttctgaccttaggtgatccacccacctcaccctcccaaagtgctgggattacaggtgtgagccactgcgcccagctgcttgacattttaaattacggtagatatctatttttgtagtttttttggacataagcttttcttttactttttgttaattgttttagcatcctgtctgcatgtttgcttgtttgtttgtttgttttcctttggtggagtcttaacccaaatgtgtttttttttttttggttaaaattaacccattgtttttacaatgataagcatgattctcagaatcctgggttaataaattctgcaaacatttattcaatgctatatgtgtgccaaggattataccaggtactgttgttacagggataactaaagccctcaggaactcagtgtattggtggtagatgaaaataataaaagtgaagaggtttgctggtggakaaaatgtgggtgacaaaagcagcatgggaccctggcagttaacagcatataaggcatagaaggagataatagaatctgttgaagaaggcttaggataggtcagcaagggatttgcatcctggaagaagggcatcacagatgctaaggaaagagtgtggaattcagactcatctttgacctgcaaggaatctttgaaatcaaatcccacatttttttgtcaaaacacaaacttatatacattttatatacaatgcactcatgctagcttaatgatggggatatgttttgagaaatgtggtgttaggcaatgtcatcattgtgtgaacatcagagtgtacttgtgcaaacctagatggtagagcgcctactacacacctaggccgtatggtatagcccgttgcctctaggctacacacttgtactacatgttactgtactgaatactgtaggcaattgtaacaacggtaagtatttgtctatctaaacatatygaaatatagaaaaggtagtgtgttgtattaccacaatagctagatgtcactaggcaatggaattttttagttccattataatcttatgggaccactatcctaggttgacgaaatcattgttatacaatggatgactgtatatataatttttcaagtcacacagaacttttactgaaatagattatgcattatgccataagggaaacaccaataaattttaaaggatcagtatcttagaaacgatgttcygcaactgtactgtaacaaagttagaacttaaaaggatatctaaaattctcatggtttgtagactaaggaaatgttgataaatgttttaaaaggtcagtcataaaggaaattaacacatttagaaaaggtggttacataccaaattttgtagactatagctaaagtagtacttagaaattaatttttgttgccatttaaaaaaattgtggtggctgggtgtggtggctcacgcctgtaatcccagcactttgggaggctgagatggatggatcacctgaggtcaggagttagagacagcctggccaacatggtgaaaccctatctctactaaaaaatacaaaaattagccaggcgtggtggtgcacgcttgtaatcccagctactcgggagcctgaaatgggagagttgcttgaacccgggaggtggaagttgcagtgagccgagattgcaccactatactccagcctctgcgacagagcgagattccatctcaaaaaaaaaaaaaattgtggtaataaacatatagtggccgtgcatggtggctcataactgtaatcccagcactttgggaggcgaaagcaggaggattgcttgagaccaggagttcgagatcagcctgggaaacatggtgagaacttgtccctacaaaaaaaaaaaaaaaaaaaaaaaaaaatagctgggcgtaatggcagatgcctgtagtttcagctacttgaaaggctgaggcgggaggatctcttgagcccaggaggtcgaagctgcagtaaactgtgttcgtgctactgcattccagcctgggtgacagagtgagactctgtctcagaataataataataataataaagccacattgcttctttttccagggcattgaattttagtaacaactttaaaagtttttttaacctgtattctattaggtatacatgtgacatttcataaataataagttttgcctaatttaataaaagcatatctgaatacacaccgtgaacaagtaacagttggtgagagaatataaatatttaagaaatttcagacccagtgcagtggatcttgcttgtaattccagcactttgggagatcaagacaagaggattggttgagttcaccatgttgccccaccttttgtagactctgtctctgcaaatttgaaaataattagtggggtgtggtggtgcacacctctcatcccagctacttgggaggctgaaacagaaggattgcttgagcccaggaggtcaaggctgcagtgagccgtgttcatgccactgcactctaccccgggcaacagagagagaccctgtctcactaagaaagaaagaaaaagaaattttagataaattatggcttctctgaattgcactactgtcttcttcaactattctggaaggatacatatcttccatgagattatatttgaagcatcttggaatagttttttttttataaaaaattatttaagacagcatttttttttcttagaaaatattctcatttgttaaaaaaattgctgtccatggccaggtgtggtggctcactcctgtaatccagcactctgggaggccaaagcaggtggatcacttgaggtcaggaatttgagaccagccaggacaacatggcaaaagcctgtctctattaaaaaaaaaaaggaagaaatagctgtccaaaaaaagaaataggggttgaccataataatatgaactaaacaaaaatcaactaaataatctattctaaccactagaattattctatttttaaaaatcttcattttgataggaaatgttttattactagaaaagtcatctttttttatgtaagatttccactagatttagtattttatgtggctggctttgaatctaaaagtgtaaaatattttcccagtagataggattaataagaggtaactcttatctttctgcagaataaccgtaactgctctgaaaatgagtaaatcttagataagagaggaggtttgtaagttatttccacctcttctcgttccttcaacatttatatgttccctttttttctcctttctgtgctcatgggttatttaccaattaagagattaaagtcagaacctcttttataaaaaaaaaattgagtacttactttaaatattgatagtgggagacatggtttcatttagttattaagtaaagaaaatggaacacttggaagtgaccatgagctcctttgaagctttgaagattgtcacctggggatgtgtgaatgaagtgttgggtgaatgagccccagacttcatagatgatggagatagctcttctttttttttttttttttttttagacagtcttgttctgtcactcaggttgtagtgcagtggcacgatcttggctcactgcaacctccgcctcctgggttcaagcaattctcctgccttagcctttgggtagctgggattacaggcatgtgccacccttcccggctaattcttgtatttttttaattgagacagggtttcgccatgttggccaggctggtcttgaactcctgaactcaagtgatctgcttgccttagcatgagccactaggcctagcagacagctcattcttaatcagtgtaatctagtgttatgtgaaggaatacatctttcattgcttagggcgcaaccacatgcaagccattacatactaatttgcgtaataattgtatatcaaaatactcagattggaattgtggctctagcaatttaagtagcaaaactgttgtaatctaggcctgagaaaataagggcctgagttaagaagattatagtaggaatgactgaaaggaacagatgataaataccaagaaagactaaattccatgagcagagcccgtagaacagtggttcttaaacttgagcatgcatcaaaattgtggagggttggttaaacagattgctaggcctcacccctagagtttctgtttgagtaggtttggagtgggtcttgaggatttacttttatagcaagttctcaggtgatgctgatgctactggtccagggaccaagtttgaaaatcactgctgtaaaggtaggtagactctttcccctccccacattctctgtgtgtaataggcagtcagagccagcagatgtgaaatgagctaagagttctaattaagtgtttttgtgcttttttttttttcaggccaagtgataatagtaaggataattcaacatgtaacattgaagtcgtgaaaccaatggatattgaagaaagcatttggtcccctaggtttggattgaaaggcaaaatagatgttacagttggtgtgaaaatacatcgagggtataaaacaaaatacaagataatgccgctggaacttaaaactggcaaagaatcaaattctattgaacaccgtagtcaggtataaatgttaataagaaaattgtctgttttatacttttttttttttttttttgagacagagtcttgttctgtctcccaggctggagagcagtggcgtggtcttggctcactgaaagctccgcctcctgggttcatgccaggctggagtgcaatggtgtgatctcagctcattgtaatctctgcctctcgggttcaagcgattctcctgcctcagcctcctgagtagctgggattacaggccctcaccatcatgcccagctaattttttgtatttttagtagagacaggtttcactatgttggccaggctggtctgacctcgtgatctgccttcctcagcctcccaaagtgctgggattacaggcatgagccactgagcccggccttatgcctgactaatttttgtattttttgtagaaattgagttttgccatgttgcccagcctggtctcgaactcgcgacctcacctgatactcccacctcggcctcccaaagtgctggaattacaggtgtgagccacttgcacccagccttttgctattaattgtgtacgaaatattgaaggttttcacaagagctttacatttgggaatgaaaagtagggtaactttgtttcacctattattaggttttctgtagatgttggaagtggaagaaaaaatgtttcccctttttaaagacttgaactttttactttaataatacagaaataactgaaattacaaacttaaatacttggctaaattataaccctctggaggaaggaacattatgtcaatagaagaaaggcttgtttttgaagtcaaaggtcagaaggaatgtgttttgtgtatatgagactgaaaatttttaattgatttttaaaatcacaagtttgaatgaaatcactttataatgctaaacaggagagaaatataaaagcatttcaggccagcacagtggctcacgcctgtaatcccagcactttgggaggccgaggtgggtggatcacttgaggtcgggagtttgagaccagcctggccaacatggtgaaactactacacacacacacacacgcgcgcacacacacacacacacacacacacacacacacctggtgtggtggcacatgcctgtagtcccagctactcgggaggctgagaattgctcaaaccagggaggcagaggttgtagtgagctgagatcacgccactgcaccccagccggggtgacagagccagactccatctcaaaaataaataaataaataaaagcatttcaatatcttaagtgatctggattccaagatctttttccattgagattgttgctctaattcaccattgcttcaaggcaaagaatattactgtatttaattttgttcaattggagattttatttttgcaagaagtgcaagaaaattttaagaataaagtagtaattcttgtattgaaaaaaatgaggaaatttgctagaacaaggcttaaaaaaagttggaatttatattgcatattatgcacgagacaagacattgaaaaattaattatggtagttcattattatgttgggtatgaggaaaaaaatgtttccctacttaaaagatttgactttttaattttgataataaaaggtttaagaaagttttttttagatggggtcttgctatattgacttacagctaaagctgttacatgagctaaaaggactatttttaacttgtcttagatggtttctccgaagaatttcatgaaacctaaggtggttaatgacatttcatgctctggagaaacaaactgtagagttagtattatttgtcacagtagctatcatgtaaatgataatcatttttgttttggatcatttattttaaatggagaaaatagtctctacagactgttaacttcaaaatgtaaatcatagtttgattaatttccttcttcaatttattggatatctaaatatttgctttctaagaaaattctctatagaattcttggttatctaagtaaaactgagaagcatgaactatgtttgttttgtgtaaattaaattttttttttttttttgagacggagtctcactgtcacccaggctagagtgcagtggcgcgatctcggctcactgcaagctctgcctcctgggttcatgccattctcctgcctcagcctcccgagtagctgggactacaggcgcccaccaccacgcccggctaatttttttgtatttttagtagagacggggtttcaccttattagccaggatggtctcgatctcctgacctcatgatccgcccgcctcggcctcccaaagtgctgggattacaggcgtgaaccactgcgcccggccttttttttttattttaagacagtctccctctgttacctgggctggaatgtagtggcacggtcttggctcactgcagcctttacttcccagggtcaatcaatcctcccatctcagcctcctgagtagctgggactatggacgcacatcaccatgcctggctaatttttttttttttttttttttttgaggtgaagtctccttctgtcccccaggctggagtccagtggcacgatttcgactcagtgcaacctccacctcccgggttcaagcaattctcctgccttagcctctcaagtagctggattacaagcatgtgccatcacacccggctaatttttgtatttttagtagagacagggtttcactatgttggccaggctggtctcgaactcctgacctcaagtaatctgcccacgttggccttccaaagtgctgggagtatagtcatgagccaccacgcccagccgtgcccgggtaatttttaactttttttacatacatgtctttttgtagaaatggggatctcactacgtttttgtttttatgcttttaaatttttgtgggtacttagtaggtgtatacgttcatggattacatgagatattttaatataggcatgcaatacgtaataatcataacatagtaaatgcggtatccatcccctcaaacatttattatttgtgttacaaataacccagttatactcctttagtgattttaaaatgcacagctaaattatttttgactatagtcactttgttgtgctagcaaatactgtcttattcattactctttttttttgtttcttgatacccattaaccatccccacttctccccccgcaccaccctcactattgttcccagcctctggtaaccaaccttctactatctgtctccatgaattcaattgttttaattttttgctcccacaagtaagtgagaacatacaaagttttctgtgtctggctttttttgcttaacataatgactatcacttggtctcactatattgcccaggctggtctcaaactcctgggctcaagcgatctgcctgccttggcctcccaaagtgttgggattgcaggcctgagccaccatgcctggcctagattaaatgtttgacatcaaatttgttgtgttatctttaccaatttggctcatgttacttattaaatagaaataactttattgatcttttgagtttaaaattatgtgttggttgcaagacaatgtaaggaaatacaagaagttatagttttgtttgagcaaatgtcaatgtttgcacaggttgttctgtacactctactaagccaagagagaagagctgatccagaggctggcttgcttctctacctcaagactggtcagatgtaccctgtgcctgccaaccatctagataaaagaggttgagccgttttttttttagttttacttctttgcccacccccccacttcagcttctagtgatacatatttatacctgacaatctactcacagcacttaataggttataatttgtagctgtgggttttttttgttgttgttttttatgtgtgtgtttttgttttcgttttttgagatagagtctcactctgttgcccaggctggagtgaagtggcacaatcttggttcattgcaacctccaccttctgggttgaatcgattctcctgcctcagtctcctgagtagctaggattacaggcatgtgccaccatgcctggctagttttacttttagtagagatggggtttcgccatgttggccaggctggtcttgaactcttggcctcaagagatctgcccgccttggtctctgaaagtgctgggattacaggcatgagccactgtacctggccaattgtgkttttttttaaaagaattttaataatatactctatagttgaaaacattattaatcttttaaaattttattatgcaaaactttatttcaaactttctattttatattaaagatattctagatagctgtatttatcttcagtattcagctaataccaacttcacaatgcttactagttacgaaatatatagtttaaagaatttatcaagtgaacagaaacttaaaggaaatgtaccaaaatgttgttattctagtatagtgggaaatatgaataccaaaatgttgttattctagtatagtgggaaatatgaatactgttttctccgttttaaaatgtttttatttttattttatttatttatttatttatttttttgagaccgagtttcgctcttgttacccaggctggagtgcaatgatgcgatctcagctccctgcaatctccgcctcccaggttcaggtgattctcctgcctcagcctcctgattagctgtaatacagtcatgcgccaccaatcccagctaattatgtatttttagtagagacggggtttcaccrtgttggttaggctagtcttgaacccctgacctcaggtgatccgcccacctcrgcctccccaagtgttgggattacaggcgtaagccattgtgcccggccctaaaatgtttttaaatctgcaagttttacatatgtagtgaaaaagacatgataaactttatttaactcttaaaaagacattcaccttttttttcatagaattattaaagctaagaaaccagatggcattctcattgtttcaccgtattagcaaatctgctactagacagaagacacagcttgcttctttgccacaaataattgaggaagagaaaacttgtaaatattgttcacaaattggcaattgtgctctttatagcaggtaaatattgtctaccaaaggcattatttctagttgagtatgaactcaactaaatacgtttaacactggtggccagacgggcattgataacatcattttagttatttttcctttatattttccttcgtattatttctaaaattaagataatagaaaaaaaamcacagtactttctttcttttttttttttttttgagacggactttttgctcttgtggcccaggctggagtgcaatggtgcaatctcggctcaccacaacctctgcctcttgggttcaagcgattctcctgcctcagcctcccaagtagctgggattacagccatgtgctaccattcccggctaattttgtatttttagtagagaagaggtttcaccgtgttggtcaggctggtctccaactcccgaactcaggtgatctgaccatctcagtctcccgaagtgttgggattacaggcgtgagccaccgcgcccagctaattttttgtatttttatttatttatttgtattttatttatttatttatttttttgagacagtctcactctgtcactagggctggagtgcggtggcatgatctcggctcactgcaacctccgcctccctagttcaagcgattctcctgcctcagcttcccgaatagctgggactacaggcgctcgccaccgcacccagctaatttttgtatttttagtagagacagggtttcaccatgttggccaggatggtctcgatctcttgacctcgtgatccgcccacctcggcctcccaaagtgctgggattacaggcatgaaccactgcgcccagcaattttttgtgtttttaatacagatagggtttcaccatgttggccaggctggtcttgaactcctgacctcaagtgatctgcctgtcttggcctcccaaagtgctgggattataggcttgagccactgcactatgccgaaatactttttttctttttttttgagacagagtcttgctttgttgcctgggctggagtgcagtggtgcaatcttggctcactgcaacctccacctcctgggttcaagcaattctcctgcctcagcctctcgagtagctgggactacaggcatccgccaccacacctggctaagtttttgtattttagtagagacgggatttcaccgtgtgttgcccaggctggtctcgaactcctgagctcagtcaatccacccgccttggcctcccaaaatgctagaattataggcatgagcctctgcactcggcctcayataaatactttttaaggtattttttcaagggatctcttaatggcagaggactgtgaaccgtaggaagtctgggcatatttctttgaaatcttatgtttatcgtcagtgtttggtatgctgtcctatagcatgtttgtttctatagaaaatattttaatctggtattaagcaaaatccaaatgattctctgtgtttttatgtgtacttacgtcactgagctgggtgtacaaatattgtgatttttgagaaatgaagttgtattaaaagccaaaacttgttgcatatgggaatgaagattagggtttacccaacctgagttgtttgggggatagtcgctgaaggcaaaataatgcagtattgagtttctcacacatttggttttataaaaagccatatggcttatgtttaaatgacttttaaggaacattaggggctgtggttatgagttatgatgatgatcatatatgtgttcttattttggaattatctcacttcgtacccagccagggaaatggtttataagcatctctaacttggaactttatatttagagcagttgaacaacagatggattgtagttcagtcccaattgtgatgctgcccaaaatagaagaagaaacccagcatctgaagcaaacacacttagaatatttcagcctttggtgtctaatgttaaccctggagtcacaatcraaggataataaaaagaatcaccaaaatatctggctaatgcctgcttcggaaatgtaagtggtccatttagtacagtaagatttcagtagtttggattagtgaatgaggtggcctttggaatttatgacaaatacaagttatgaagcatgttatagataaygtgatttcatttattcatgacaactgcagatggctctctattgtttctaagaagagcaccattcctgtgtatcctatgtgctgcaatcattgctagttagtaatatagtttcagtagactaaatatacctcaagaaatcttgttttaaaaattacttttctttgggaggccgaggtgggtggatcacctgaggtcaagagtttgagaccagcctggccaacatggcaaaaccccgtctttactaaaaatacaaaaattagccgggcgtggtggcgggtgcctgtaatcccagctacttgggagactgaggcaggagaatcgcttgaacctgggaggcggaggctgcagtcaaccaagatcctgccattgcactccagcctgggcaacaagagcaaaactgtcacaaaaaaacaaaaacaaaaaattagccgggcgtggtggcaggcgcctttaatcccagctactcaggagactgaggcaggagaattgctggaacccgggaggtggaggttacagtaagccaacatcgcaccactgcacttcaacctgggtgacagagcgagactctgtctcaaaaaaaaaaaaaaaattacttttgtcagggcgtcgggtcatgcctgtaatcccagcactttgggatgccgaagcaggtggatcacttcagctcaccagtttgagacccgcctgggcaacatggcaaaaccctgtctctacaaaaaatacaaaaattacctaggtgtggtcgtgcatgtctgtagtcccaggatgaggtgggaggatggcttgagccagaggtgaaggttgcagtgagctgagatcrcaccactgcactccagcctgggtgatagagccagaccttgactcaaaaaaaaaaaattattttaaatcctgttaaaaattttcagtatacactttttcatcggtgataacattataaacttgagtatatcttaaagtaaattgttgtatatattggtataatgcaaattaatgtggtatttactggattttttaaatactcgcttttttctttttgagatggaatctcactctgtcacccaggctggagtgcagtggcatgttgtcagctcactgcaatctctgctgtctggattcaagctattctcctgcctcrgccttcaagtagctgggattacaggcgcctgccactgcgcccagctaatttttgtagttttagtagagacagggtttcaccatcttggccaggctggtcttgaactcctgacttagtgatccacccacctcagcctcccaaagtgatgggattacaggcgtgagccaccttgcctggtctaaatactcgtattttaaatgtttatattttcagtaacttttgatacagatgcaaattttctaaaggtccatttcatagtccttgtgggattcatttaaaaaaataatagtaatatgtacctgtaaagttagaatttttcttttttttttttttttttttaagagacagggtcacactctgctgccctgactggagtatagtggtgcaatcatggctcactgtagcctcgaacttctgggataaagttcacagtgctcctgcctcaacctcctgagtagctaggaccataggtgtgcaccaccaaacttggctaacttttttttttttagagatggggtcttgctatatggcccaggctggtcttgaactcctggcctcaagtgatcctcccatcttgaccacccaaagtgctggtattacagctgcgagccactgtgccatggctaatttttttgttttattttattttacgtgattatagaaacagggtcttgctatgttgcccagcatagtcttaaattcctgagctcaagtgatcctcccactttggcctcccaaagtgttgagattataggtataagccactatgcctggcctagaatttatctttgcgtagtatttttctttatgtaaaatttcattgctttagcttcattttttctttgcagaatgagtattaatgatgtgactttagaaataattggattattatttccctaatattagactttaacacaaggaaacattgcagtggagaaagtttatgtaattgtggatagactgcgtatgtgtagtgagtatactatacatatgtaaaatttaattgctttcatttttttaatctcaggccttttgtagtatgtgaaacttttttttttttagacaaagtcttgctctgggctgggcaaggtggctcacgcctgtaatcccagcactttgggaggccaaggagggtggatcacgaggtcaggatattgagaccatgctggctaacacaatgaaaccgcatctctactaaaaatacaaaatattagctgggcatggtggcaggtgcctgtagtcccagctactcccaaggctgaggcaggagaatcccatgaacccgggaggcagagcttacagtcagccaagattgtgccactatactccagcctagtcaacagagagactccgtctcaaaaaaataaataaataaataaaaaataaaaaagtcttactctgttacccaggctggagtgtcttgacccactgcaacctctgcctcctgggttccagtaattctcatgcctcagcctcccaagaagctgggtttacaggcacgtgccaccacacccagctaatttttgtatttttagtagagacggggttttgccatgttggccaggctagtctggaactcctggcctcaagcagtccacccacctcagcctcccaaaatgctgggattataggtgtgagccactgcacccagccaaaaaaatttttttttttgagatggaatcttgctcagtcgcccaggctggagtgcagtggcacgatctcagctcatgcaacctctgcctcccgggttcaagcgattctcctgcctcagcctcctgagtagctgggactacaggtgcgtgccaccatgctcagctaatttttttttttttttttgagacagaatttccctcttgttgctcaggctggagtgcaatggcacaatcttggctcactgaaacctcctcttcctgaattcaagtgattctcytgcctcagcctcccgagtaaactgggattacaggcatgggccaccacgccaggctaattttgtacttttagtagagacggggtttctccatgttggtcaggctggtcttgaactcccaacctcagatgatccacacgcttcggcctcccaaagtgctgggattacaggtgtgagccacagcacctggctatttttttgtatttttagtagaaacggggtttcaccgtgttagccaggatggtcttgatctcctgatctcgtggtgatccagctgccttgrcctcccagagtgctgggattacaagcgttagcccctgcacccggcctcaaaaatttttttttctttttttgagatggagttttgctcatgttccccaggctggggagtaatcttgcaatcttggctcaccacaacctccgcctcygaggttcaagtgattctcctgcctcagcctcccgagtagctgggattacaggcatgcaccaccacacccggctaattttgtatttttagtagggatggggtttcttcatgttggtcaggctggtcttgaactctcaacctcacgtgatccgcccacctcagcctcccaaagtgctgagattacaggtgtgagccactacacttggcctcaaatgtttttttatgtaaaacgtaacttgttttagtttcatttttttctttccagaatgaatttttttttttttttttggacagattcttgctctgttgcccaggctggagtgcaatggcatgatctcagctcactgcaacctccacctcccgggttcaagtgattctcctgcctcagcctcctgaatagctgggattacaggtgcttgccaccatgcctggctaattttgtatttttagtagagatggggtttctccattttggtcaggctggtcttgaactcctgacctcaggtcatctgcccacctcagcctcccaaattgctgggattacaggcatgagccacggcgcccggcccagaatgaatattaataacatgacttcagaaataattggatcattttcttccctaacattagactttaacacaagataacattgctgtggagaaagtttatttaattgtagttagactgcatatatgtagcgaatctgtcatacatatataaatactaataagcttctgagattgcatgttatttagtagtgctgccagagagattttaaatggtttttttttyttttttttgagacggagtttcactcttgttgccyaggctggagtgcaatggcgtgatcttggctcaccgcaacctctgcctcccaggttcaagtgattctcctgcctctgcctcccgagtagctgggatgacaggcatgtgccaccatgcccggctaattttgtatttttagtagagacagggtttctccatgttggtcaggcttgtctcgaactcctgccctcagatgatctgcctgcctcggcctccgaaaatgcyagggttacaggcgtgagccaccgcgcctggctataattttttttatattgcatttgggagcaggttattatggtttgttttctgtaatggtattatatgtatcagcccaagaagtgggggtatctacccctcagggatcaaagtgccaataaaacaccatttttggagatcccagcctgtgggtgcaacaagggtggggcgatccctagcactttcttgcaagactattgttgagcaattcatttaaaactagtagagggccgagcatggtgcctcaggcctgtaatcccagcactttgggaggctgaggccagtgggtcacttgagtccaggggtccgaatccagcctggccaacatggtgaaaccctgtctctactaaaaatataaaaaattagcttgtcgtggtggtgtatgcctgtaatcctagctactcaggagactgaggcatgagaatcgcttgaacagggtgggggtcggagggtgtctcaaaaaaccccagaaactaagagaatgtttacttaacatttctaacattttactgtaggttgtggaaaatgtaaaaatgacaggctcaatattagtctgttttgttttgttttgtttttgtttttgtttttgtttttgagaggtrgttttgctcttgttgtccaggttgttgagcaatggtgagatcttggctcactgcaactttcacctcccgggttcaagtgattctcctgcctcagcctcctgagtagctgggattacgggcgagcaccaccacacctggctaattttttatttttatttttttttttttttagtagagatggggttttcaccatgttggccaggctggtcttgaacwtctgacctcaggtaatccacccgcctcggcctcctggagtgttgggattacaggcgtgagccaccacaccyggcctcaataataatttttaggagtcagatgaacaagtaagttgtaggaaaatgcagacacaatacttacgtatgtaatataaacagaagtttttttctctttggtcttttcatagggagaagagtggcagttgcattggaaacctgattagaatggaacatgtaaagatagtttgtgatgggcaatatttacataatttccaatgtaaacatggtgccatacctgtcacaaatctaatggcaggtgacagagttattgtaagtggagaagaaaggtcactgtttgctttgtctagaggatatgtgaaggagattaacatgacaacagtaacttgtttattagacaggtaatgaaatgttactttttttgataacagctttattgatatataattcacatctgtgtagttcatccatttaaaatgtacaattcgctggtttttagtatattcacagcgttgtgcagctatcaccacaatcaactttgagtattttcatcaccccaaaaagaaactcccaaggaagaagccctataccctttagtagtcacttttcattttcctccaatttccccagcccgtggcaaccactaacctgctttctgtctctgtagatttgcccattctggacatctcatgtaaatggaatcatgcaatatgtggtctttggtgactgggttttttcacacagcacactgtttttgaaattcatcttcatgttataacatgtatcagcatttcattctttttattttaaataaattgaggtaaaattcatataacaaaattgatcattaaccattttaatgtgtataattgagtggcgtttagtatattcccaatattgtgcaaccatcacttctgtctatttctaagacacttttatcaccctaaaaggaaacctcattcctattacgcagtcacttcccactctctcctccctgaagtccctggcaaccactaaattggctttctttctgtatggattcatccattctggatatatgatataagtggaaccatacaatacgtgaccttttgtgtcttgcttctttcacttagcctaatgtttgcaaagttcattcatatttcagcatatatgagaccctcattttttttatggcygaatatattctgttgtatggatacaccacattttgttcatccattcaccagctgatggacatttgagttgtttccacttttttgctgtaatgattaatattgctatgaacattgacatgcatagttttaggtagacatactttcattttctttgtagttacctaggcatgggtcatgtgctaatttcatgtttaacattttgaggaactaccaaactgytaaagttttgtttagtacattatgttccatagtgatgatgtggacataatcttatctaattcttacaaccacatgtatagcagacagcatagatgccaccctgtgttagctataatgcttatttctccttgcatgctgggcactgactattttgttctctccttttttaaataaaaatgtttatttttcccatttatagttgtgatataagtatacccatttcagttacaacaaaatggctgatttaaataaaaatatataggcggggcgtggtggctcacgtctgtaatcccagcattttgggaggccgagttgggcggatcacaaggtcagatcaagaccatcctggctaacacgatgaaaccccgtctctactaaaaatacaaaaaaatagctgggcatggtagcgcacatgcctatagtcccagctacttgggaggctgaggcaggggaatcgcttgaacccggaggcagaggtttcagtgagccgagattgcaccactgccctccagcctgggcaacaagagtgagactctgtctaaaaatatatatatatatgtgtatgtatattctactattaatatttttatttaggctggaccttgtgagccaccacgcctggcctaaataaaaatattaatagtagaataattgataggaaaatmtgggcaggcgaggtggtgcacgcctgtaatcctagcacactgggaggctgaggtgggtatatcgcttgagaccaggagtttgagaccagcctgggcaacataagtaaaacctcgtctctaccaaaaatacaaaaattaggaggtggtgcatgtctttagtcccaggtactgtggaggccgaggtgggacgatcagttgagcccaggaggttgaggctgcagtgagctgagatcacacctctgcactgcatgtagcctgagtgacagagtgagaccctgtcttaaagaaaaaaaaaaaattgtggcagagaccaatatccatattcacgaataatccatattccctcctctttcacagtcagatggattgtgttttccagcatttcttacagttaatacgggcatgcccgaccatttcttaatggatagaggtcagcaattgggactcattgacatctgagtaactgtaatggaaatgtccaggcttgttccctactgatcagtaatcttagttgagtcataaccaccccttgtctagatgtcatgacatgggatggtgatccacaatattccagttgtctgcttggatttgtgtatcctttgcagtatttatttagtgtctaccatgtattaagcactttgcaaatccttgaggaatttatggtcttgcgtgtagacatacatattttctttttttttttgacacatggtctcactccagcccaggctggagtacagtggcatgatcacagttcactgcagcctggacttcctgggatcaagcagtccttctacctcagcctcttgcatagctgggaccacaggtgcatgccaccacacctggctaattttttaattttttgtagagatgggggggtctcactacgttgcccagcctggtcttgaactcatgggctcaagtgatcctcctgcttcagccttctgaagtgctagcattataggcatgagctactacacccagcttattttcaatctgatatgtgttcaaattgataggaacacagaggagaggtatttaattcaattttaggaggttcagggaaggctttttttttttttgagaccgtctcactgttgcccaggccggagtgcagtagcacgatctcagttcactgcagcctctgcctcccaggctcaagcgattctcctgcctcagcctcccgagtagctgggattataggcgtgtgccaccatgcccgactaatttttatatttttagtagacgcagggttttactatgttgtccaggctggtcccaaattcccgatctcaagtgatcctcctgcctcagcttcccaaagtgttgggattacaggcgtgagccaccatgccagcccaagggaagccttttcgaagagctaattctgaatcttcatcctgtggattaataaattagtctggtgaaacagtgtgagaagagaatactatactgggcaaacctgttgcacaaacgtgtgatgtagtgtgacatggagcattcaggataatgcaggtaattacgttatttctagaatataaaatataaggaagagagtaattagatcaggtcatagaatgtcttacgtatcattttaaaaagttttccatcctgggccacatagtgagacccccatctctccaaaaaattaaaaaattagccaggtgtggtggtgtacacgtgtagtcccacctactcagggggctgcggtgagataacagcttgagctcaggagttcaaggctacagtgagccatgatcatgccactgcactctagcctaggcaacagaacaaggccctctctcaaaagaaaaaaagtttagattttatttattctattgaataaatagaattgtattgaaaggttttaaacagaagagtgggtaatcattggatttgcattttcctctggctacattgtagagaattgagttcattaatggaagaaaaactaaaagcaaacctggaagstgttgcagtgacccaggctagaggaaattgaggcagggtagtgttggcagagagaatggaatgactttgagaagtatttagaaagtaaaagtggctggcatttggatactgattgggtgtgtgggttggggagaggatgagggagagggaaggatcaagatggcagtgcaaatgcaaatgccaatgccattaactgtgatcaggaccagagaaggagcatcaggttcagcagggatgaggaggagttctgctttgaaagtactgtgctttcacagcctgggtttagctaagtggagagatctcactgcctactaaatatccaaacccaaagcttgggtgaggaaccaggtaggagaggagtgtgaggtcaggcctaaagatggaatttggaatttggaggcacgtgagggcctgggaccctggagcaaacaatgagaaagagtagtacaatgaaccagggaagggactctagggaataccagagcttaagggacagatagaagacagggagaaggtggcagaaaagaagcctgcactccaggttagaggaaggaagagccatgcattcaggatccctctggggatggtgaacccgtgttcgactgcaagggtaaatgaattttcagcaaatgttgcaggttcccaattattaattgctttgaccttggtgccttggaccttccccttccctctgccttttcccaccaatccagggcctcatgctgtccttgattggcaagtgtgactgagggctggtagctattttaatagctattctggcccattcattcttttagcagatagcagcatatttcttatacagactatgcgaaatggcgagcattcatgtatatttgttttgttgttttagaarcttgtcggtccttccagaatcaactttgttcagattagaccaagaagaaaaaaattgtgatatagataccccattaggaaatctttccaaattgatggaaaacacgtttgtcaggtttgtaacaatgagcaaatttgaatttcactccacttttctaaggaatattactaaaagtgctttttcacttttcagcaaaaaacttcgagatttaattattgactttcgtgaacctcagtttatatcctaccttagttctgttcttccacatgatgcaaaggatacagttgcctgcattctaaagggtatgctaaaatcaccatgtctgctttgattaatttttcttgtttctatttgatttatactgtagtctaatatcttgattagacttgcaactacaatgtttagaccaagactctttggaaatggttttgtattgaagaatagacttggatagagactgcttttcttatgaaataattaacttttcctttgaaattcaacactctttttcctgttatttttgaatttaaatgtaggtttgaataagcctcagaggcaagcratgaaaaaggtacttctttcaaaagactacacactcatcgtgggtatgcctgggacaggaaaaacaactacratatgtactctcgtaaggttattattcttctgcttagagacaaaatatttgtatcagcttctcctcagttcagaggatgtaatattgaatatcaaaagggctgaattttaattcagtgtctttgtttcaaatgaactttttagaatgatgagaaatagtaaagctgaagcacaaacagttgtaatcatgtagatttctcgcatttagaattttctaagatcgctttccgttagtggtatgtgatatttatcactatatgttttcctttccctttaaagatgatgttagaggccgggcgttgtggcttacgcctgtaatcccagcactttaggaggccaaggcgggcggatcacttgaggtcaggagttcaagaccagcctggccaacatggtgaaaccccctctctactaaaaatacaaaaattagcygggcgtagtggcatgcgcctataatcctagctttactcgggaggctgaggcaggagaatcacttgaacccaggaggcagaggttgtagtgagctgagatcacgccattgcattccaatctggacaacaagagcaaaactccatcctaaaaaaaaaagatgttagagatttttcttggattttttttttcatgtcagtaaatttctttttttcttttctttttcttttttttttttgagatggagtcttgttaacgtgagccaggcgaggtggatcatgcctgtaatcctagcactttgggagtccaagtcagggggattggtatttgagaccaggttggaatgcagtggcatgatcacagttcatgcagtctcaatctcctgggctgaaacagtcctcgttcctaagcctcccaagtagctgggaccacaggggcgcaccacctcatttggctaattaaaaaaagaattttttaaaaagagatggcatctcactttgttgcccaggcmagtcttgaatttctgggttcaagtgatccacttgcctcagcctcccaaagtgctgggattacaagtgtgagccaccatgcctggcctatgatgtattattgacatattattaataacgtataataatgtcatgtaatttttgtaaaatgttttggcttcataatttttacttggctcagctcttagatatggttcttgttaagtttataaacatgttaaaaattatctggaattaaaagtaaggctgttttttcttttttctcttacccattattaggtaagaattctctacgcctgtggttttagcgttttgttgaccagctatacacactctgctgttgacaatattcttttgaagttagccaagtttaaaataggatttttgcgtttgggtcagattcagaaggttcatccagctatccagcaatttacagagcaagaaatttgcagatcaaagtccattaaatccttagctcttctagaagaactctacaatagtcaagtaagcacaattattgtataataatactaacagttaaygtccacagccagaatgaggggagaaactgtactctgggaaatttagtcacattgactggatttgcacatgattaatttatatgtactatacgaccagtttattaacttatagtttgctatttccttctgatctgaaataaggttttgggtttattatttagggctctcttctagtttcaaatatcctaggaaactactaataatcagggtttcagccaggtgcgatggcttacgcttgtaatcccagcactttgggaggctgaggtgggtggatcatgaggtcaagagttcaagaccagcctggccaacatggtgaaaacctgtctctactaaaaatacaaaaaaaattagccgggcgtggtggtgggcgcctgtaattccagctacttgggaggctgaggcacggagaatcgtttgaacctgggaggcggaggttgcagtgagcagagatcgcgccactgcactccagcctaggtgacaatgcaagactccagctcaaaaaaaaaaaaaaaaaatccgggttttttagtaagtttgaattagaaacaatggtacttaatagtcttgtgataactatctctaggcttttatatagaatctaatttttattttattttgttatttaatgtttatttatactgggagttcttaacagatttttttttcttttttttttttttttttttgagatggagtcttgctctgtcacccaggctggagtgcagtggcgcgatcctggctcactgcaagcttcgcctcctgggttcacaccattttcctgcctcagccttccgagtagctgggactacaggcacccgccaccacgcctgactaattttttttttttttttttgagacggagttttattcttgttgcccaggctggagtgcaatggcgccatctcagctcacagcagcctctgcctcccggattcaagcgattctcctgcttcagcctcctaagtagctgggattacaggcatgcctgaccacgtcctgctaatttcgtatttttagtagagacagggtttctccgtgttggtcaggctggtctcgcactcccaacctcaggttatcctcctgcctcggcctcccaaagtgccaggattataggcgtgaactactgcgcccggctttttttttttttttttaattgaaccttccaccaagtagctgggattatgggcgcggctatagtgcctggcttaactgatatttttgtctttaaaaaatttcccaaagattagatttaatagagtgttcctttacctcctttgtctaatgctagcatatttttrtctaatatctgtccctgttattgataaatttagaactggctaagatgtatatctggttaacatttttattaaattaaacattttactttgaggtaattgtagagtcacatgcagttgtaagaaatactagagagagcctgtgtcccctttatccagtggtgacatcttgcaagtctgtagtacaatgtcacacccaggatgttgacattgatacagtccctattctattaccacaagattcctcatgttgcacttttatagttgtatccactctcctgccttacccctccttaacctctgacagccatgactctgagactctgatctccattttgataatttggtcgttcgagaatgttaagtaaatgcaatagccttttgggattggtgttttttacttagcctgattctccagagcttcccccagatagttgtacgtattaatagtttgttcctttttgttgccaagtatttttccatagcatggatgtactgcattgtgtttaaccattcaccctctgaaaatctggattgtttccagtttttggatattgtgaataaagctgctgtaaacaatcatgttacaggtttttgcgtaacataagtcttcatttccctgggataaattcccagtagtacaatttctggattgattggtagttgcatgttcattttttttttttaatctgccaaactgtttttctaagcaggaacatttcacgtgtatgagtgatctcctcagcatttggtggcgatacaatttttttttattttgagacggagtctcgctttgtcccccaggctggagtgcagtggtgcaatcttggctcactgcaagctccgccttccagctcatgccattctcctgcctcagcctcccgagtagctgggactacaggcgcctgccaccacgcccagctaattytttgtatttttactagagatggggtttcatcatgttagccaggatggtctcaatctcctgaccttgtgatctgcctgtctcggcctcctaaagtgttgggattacaggcgtgagccactgtgccgggcttttttttttttctgagatggagtttggctctggcgcccaggctggagtgcagtggtgcgatctgagctcactgcaacctttgcctcccaggttcaagcaattctcctgcctcagcctcctgagtagctaggattacaggcatgcgccaccacgcctggctaattttttatatttttagtagtgacgaggtttcaccatgttggccaggctggtcttgagctcccgacctcgtgatccacccgccttggcctcccaaagtgctgggattagaggcatgagycaccgtgcccagctgatactatttttaattttagccattttggtaggtgtttggagattttaatttgcatttacccagttaaaatgtgtgtgtgtgtgtgtgtgtgtgtgtgtgtgtgtgtgtgtgtgtgtttgagacaaggtcttgctctgttgcccaggctggagtgcactggtgagaccacgsctcactgcasccctgaccttctgggctcaagtgatctttctgcctcagcctcctgagtarctagaactatacaggcatgtaccaccatgcctgcctaatattttcaatttttttatgttgtccaggctggtcttgaactcttgggttcaaatgatcctcccacctctgtctgcctcccaaagtgttgggattacagatgtgagccactgcatccagccataatgtggtggggttttttttttgtttttgacacgttattgcccaggctggagtgcagtggtgtgaactcggcttactgcaacctctgcctcccaggttcaagtgattctcctgcctcagcctcccaagtagctgggattacaggcatgcgccacatattttttttttttagtagagacggggtttcaccatgttgtccaggctagtctcgaactcytgacctcaggtgatccacctgcctcagcctcccaaagtgctgggattacaggcttgagccaccacaccyggcccataatgagtttttcatgtgcttatttgtcatctgtatctcttcttcatgtttttgcccattttggattatatgctttgtagtgttgagttttgagaatttttaaaatgtatattctaatactagccctttaatggatatgtggtttgcaggtattttctcccactctatcgcttgctttttatcctcctcatagggtcttatgcagaacaaaagatagttttatttatttatttattttatttttttgagacagagtcttgctctgtcgcccaggctggagtgcagtggcacaatctcggctcactgcaagctctgcctccygggttcacgccattctcctgcctcagcctcccaagtagctgggaccacaggcgcccaccaccatgcccggctaattttttgtatttttttagtagagacggggtttcaccgtctcttagacaggttggtctccatctcctgaccttgtgatctgcctgccttggcctcccaaagtgctgggattacaggtgtgagccaccacgcccggcctatttatttattttttgagacagactctcactgtgtcacccaggctggagtgcagtggtgtgatctccacttactgcaacctctgcctcccaggttcaagcgattctcctgcctcagcctttcaagtagctgggactacaggcatgagccaccatacctggctaatttttgtatttttaatagagatgaggttttgctgtgttggccaggctggtctcaaacttctgacctcaggtgatccgcccacctcagtctcccaaagtgctgggattacaggcgtgagccactgtgcccggctgcaaaaggtttttttttttgaggaagtccggaatatacattttttccttttatagattatacttttggtctcaagtctaagaactctgtctagccccagatgctgaaggttttcttttttgagacagaatcttcctctgtcacctaggctggagtgcaatggcccgatcttggctctctgtaacctctgcctcctaggttcagatggttctcatgcctcagcttcccaagtagctgggactacaggcatgcactaccatgcctggttaattttttgtatttttattagagacagggtttcactgtggtggccaggctggtcttgaactcctggcctcaagtgattcacccatcttgccctcccaaagtgctggtattacaggtgtgagacacagcgcctggcctggtatttgttttttgggtttttggggtttttgttttttttttkaattatgaaacatttcccatttttatttataaaattattaattaaatttgcaaaagtagatttacagagcctcaggtaacaaaacaggaaatgaaatgttccagagatggccgggcgcggtgtctcacgcctgtaatcctagcactttgggaggccgaggcaggcggatcacgaggtcaggagatggagaccatcctggctaacacggtgaaacgctgtctctactaaaaatacaacaaattagccgggtatggtggcaggtacctgtagtcccagctacttgggaggctgaggcaggagaatggcgtgaaccggggaggcggagcttgcggtgagccgagatcgccgccactgtactccagcctgggagacagagcgagactccatctcaaaaaaaaaaaaagaacacaaacatggccgggcccagtggctcatgcctgtaatcccatcactttggaacaccgaggcgggtggatcacgaggtcaggcgttcgagaccagcctggccaacatagtgaaaccctgcctctactaaaaatacaaaaaattagctgggcatggtgtcaggcacctgtaatcccagctactcgggaggcttaggcaggagaatcgcttgaacctgggaggcggaggttgcagtgagccgagataatgccactgcactccagcctgggctacagagcaagactctgtctcaaaaaaaaaaaaaaaaaaaaaaaagaaatgttccagagacattctgaaaagttccaaagaaacacacactagcctaaaaatctcagttaaaccatggttgcacaacaggttatatttattcctgcattttctcaataagttcctccttatatttgcctttctcttttctgacttgtcgagacttggctttgtgttcaataatttttttccgatccttgttgagatttagcctggtgataaccaccttgtttgggtgagtacccacgtggacggttgtgctgttggcctactcacgctgcacctgctcartgtagatgacatctttctttctgtacacctggaytaccttgccaatttgctgacctttgtagtgtccttgaactacctggacctcgtcgtccttgcggatgggtgtggagcggacattgtacttctgccgcagctccttggagagcggggatgacatgatcttcckgtgcacgtgcaagggggcatggaagtgacgtttgcggtttttgctgcggtccargttcacgaagggattgaacttcatggtgatgctccggctagcggcggcctcaggcctgttttgtttttttttttttttttgagacagtgactcactttgtcacccaggctggagttcagtggcatgatcaaggctcactgcagcctcracctccttggctcaagtgatcctcctgcctcagccctccaagtaggtgggactataggtatatgccagcatactcagcttatttttgtattttttgtagagaccggttttcgctgtgttgctcgggctggtctcaaactcctgagctccagcaatctgcccaccttggcctcccaaagtgttgggattacaggcgtgagccactgtacctggcccagttatcatatttttagttctaaaatttccattttattctttctatcttctatttcttggctgagactttgttttttggttcatattcaagcgtgttcataattactcattaaatgttgttaccrtggctgctttaaaatcttggtcagatagttctgacctctctgtcattctggtgttggcatttatagattgtcatctgttttcattgagtttgagattttcctggttcrtctttaattattgatttttttattgaaacatgagcatattttgttgttactgaaaacttctgttttagctggcttcctctcacactgccatggtaggggaagaggggtaccacctcattcctgccaggtgggagtcgaagtgtgggttccccactcagycttctttgaccaaagtgggaggttcctcgttaccgctgggcccacttggttggggtggaagtctaggcttctgatgtggtctctactaacatgtggggttggtgccagttaccagtcatcggggatgaaagacctgactccctacttggctttctctgacacccgcctggtggggtgtggggcaccttgttacagccttgagaagggcagagatctaccctcctccctgtttgctggtgtctgtggttgtggggctgtactttttttccagtgatatttggctagagtagttattgtgtgaaagttttctgtctagctaggctttccttttcctgttccttcagctggagagagcagactttggttgcagctgtttttagcacccactggtgtgccgtggctccttcagttccaaatctgggatctatgaggcaaaaagaaagcccagggaatcaactactgtgttgtttctttggtcctgagctccctagctggtctgccttctctccacctttcagagtcttcttttgttttttttttttatatataatgcctagggattttagttgtcgtttgtggaaagaataaggaaaagtactccatcttcccagaagcaaagtcctggttgacattaaacaaacaaacaaacaaacaaaaaaagaactaacttattacctcttgaatgttccagatttccactgggaaatatccaaatgtgagcattgttcaatagtgtctggaaagtttacttgattatttttaatttgtagaaaaaaattaaaatttgcatgctataaatatttcagaattaaataatatcgaaggattcctgatgccatagaacaaaaaccttttgatcttttcatttcaaaaatgagagaaacaaaactacatttcttttacatrttaaataactgatctgttttccttgtttttagcttatagttgcaacaacatgtatgggaataaaccatccaatattttcccgtaaaatttttgatttttgtattgtggatgaagcctctcaaattagccaaccaatttgtctgggccccctttttttttcacggagatttgtgttagtgggggaccatcagcagcttcctcccctggtgctaaaccgtgaagcaaggtaggcagacacttaagtgttaattttaaactagattattttcaaggaacagatttagtacactgwtaaacatgaatctgatttattgacagagctcttggcatgagtgaaagcttattcaagaggctggagcagaataagagtgctgttgtacagttaaccgtgcagtacagaatgaacaggtayttgtaacagtgttagctaggagtggttttcatgtttgtttccatctaccaaaactaaagttatcttttgtaattcccttagtaaaattatgtccttaagtaataagctgacctatgagggcaagctggagtgtggatcagacaaagtggccaatgcagtgataaacctacgtcactttaaagatgtgaagctggaactggaattttatgctgactattctgataatccttggttgatgggagtatttgaacccaacaatcctgtttgtttccttaatacagacaaggtaaaaaaaaaaatttctgtttagtttttctcattttgtcctattatttaaatttctcagttttcattagcacatgccctaattagagcttatcagttaaaaggcaaaactaggctgggcgtggtggctcacacctgtaatcccagcactttgcgaggccaaggcgggcagatcacaaggtcaggaattcaagaccagcttggccaacatggtgaaaccctgtctctactaaaaatataaaaagtagctgggcatgatggtgggtgcctgtaatcccagctactcaggaggctgaggcatgagaattgcttcagcccgggaggcggaggttacagtgagctgagatcacrctgctgcactccagcctgggtgacagagcaagactcccatcttggggggraaaaaaaaggcaaaactaatgtacttctcatacttcaacccaaaatagtcttttctttctttttcctttctttttctttttttgagacggagtcttgctctgttgcccaagtggcatgatctcggctcactgcaacttcctcctcccagattcaagcgattctcctgcctcagccacccaagtagctgggattacaggcacccaccaccacaccagactaattttgtatttttagtagagacaggctttcaccatgttggccaggctggtcttgaactcctggcttcaaatgatccgcctgcttcagcctcccagagtgctgggattatagtgtgagccactgtgcccggcccaaaatagtctttctttctataggcccagtattttttggaggaggtttattctggaggtcagtagatatcaaaattgacttttgaagaaggaaggccacaaagtgaactcaggggtataattctatttcctagaaaaggaaatggcactgatactatcaaagggctgggtttacaaatggacagagggtataataaattgatgtccttttaaagactttttaaaaaacagactttaaacccgggcacagtggctcactcctgtaatcccagtactttgggaggccgaggggggtggatcactggggtcaggagttcgagaccagcctgaccaacatggcaaaaccctgtctctactaaaaatgcaaaacttaactgggtgtggtggtgcgcctgtagtcccagctacctgggaggctgaggcaggagaatcgcttgaacctgggaggcggaggttgcggtgagccgagatcgcgccactgcactccaacctgggtgacagagtgaaactccatctcaaaaaaaaaaaaagctttattttttagagcagttttaggttcatagcaaaattatgtggaaagtacagaggtttctcataacctccctcccccacatatgcacatgaagacctttttacaaaccagtcattaaaaagaaatctgcacaacgacttttttgtttttgtttttgttttttaggatggagtcttgctctgtctcccaggctggagtgcagtggtgcaatctcctggtgtctcagaaaaaaaaaaaaaaaatcaagattgcttagggatgatgtaggaggaaagtagtctttgaagagatgtatcaggaggtaggacagcagttttatctgctccattatttgtataaaaggggacaagaaaatggaaagagcacagatatacgacccagatctaagtttgtttgtttgattctgagacggagtctcactctgactcccaggctggagtgcaatgacactgtgtcagctcactgcaacctccgactcccagattcaagcaattctccttcctcagcctcctgagtagctaggattacaggcacgcaccaccacgcccagctaatttttgtatttttagtagagacggggtttcactgtgttggccaggctggtctccaactcctgaccttgtgatccgcctgcctcagcctcccaaagtgctgggattacaggcgtgagccaccgcgcccggccaccctaagttcaaatagtagtgccacagtttattgtgaggccttgggaaagttacttattcttttctgcctttgattcctgtaaaatgggggataacaaagtgaagtatttgaagctcagtgtgtgatcagctttcgtaggtattttagcctcaatcatagcatgtttcagataggtggcctctgcgtggctttctgaaagtgactaatattaatattcatttttgttgattctttcaccttcatcttttagacaaagctatttttcatctccaagtcggtagtatagtctttatggccasttgcgtacttatagtactctttagagattgtattatcagcaggctgtatatttttccacttaggttccagcgccagaacaagttgaaaaaggtggtgtgagcaatgtaacagaagccaaactcatagttttcctaacctccatttttrttaaggtaatttagaattttcaaggctagcaaatattaaagtgcagaataaaagaatgttagactgtaagacacttacaatctggcattaagtctcgtttattaagataagggggggattgaagccccattgtttttattttgagaaaatgtatctaagacatgtaatattttataatgacatttggagttttcatttacgataataactttttgtaatgtcagctaattctaattgagacaatactatgttgtagtgattaggaattggaaatttttctgtgaaagaaatagcagaaggtgaaatgtatttctttgtactgtgtgtgtgtgtgtgtgcactgttttagtagcatataatcctttacgttctcatgaaactaaaaattaagggagcaatgtctaaggaattatttcatcctgggaaatatggacagatwtagagcaaattcagtaattgtattcagtctttgagataggaaagtttgttataaacatcagttgggcacataatgtaaacatttaattattaaattcagaaaagtttaacttaatcaggrtttctttcttttaaattgtgtctttttctatttaggctggatgcagtccctctgatattggtattattgcaccgtacaggcagcaattaaagatcatcaatgatttattggcacgttctattgggatggtcgaagttaatacagtagacaaataccaaggaagggacaaaagtattgtcctagtatcttttgttagaagtaataaggatggaactgtgagttaattgtgtttgctactgattcatttggggcatttctctctctttaaaaattgtgggccgggcgcggtggctcacacctgtaatcccagccccctgggaggccaaggcgggtggatcacctgaggtcaggagtttgagaccagcctggacagcatggcgaaaccctgtctctactaaaaatacaaaaattagccgggcgtggtggcaggcgcctgtaatcccagctacttgggaggctgaggtaggagaattgcttgaacccaggaggtggaggttgcagtgagccgagatcgtaccattgactccagcctgggcgacagagcaagactctgtctcaaaaaaaaaaaaaaaaaaaaaattgcggtttaacattgagaacatgtggacacagagaggggaacaacatacaccatggcctttagcgggttgggggtgaggggcgggaacctggtggatgggtcaacaggtgcagcaaaccgccatggcacatgtctacctatgtaacaaaactgcacgttctgcagatgtattctggttttttttttttttaaagaaaataaaattgtggtttaaaagaacacataaaacatacatcttactttttttytttttttttgagacggcgtttcctcttgttgcccaggctggcatgcagtagtgcgatctcggctcactgcaaccttcgcctcccaggttcaagtgactcttccgtctcagcctcccaaatagctgggattacaggcatcgccatcttgcccggctaatttttgtacttttctagagatggggtttcaccatcttgtccaggctggtctcgaactcctgacctcagatgatccacctgccttggcctcccaaagtgctgggattccaggcgtgagccactgtgcccagcccatcttaccatttttaggtgtacagtttaattagtgttgagtgcattcacagtgttgttcaacagatctctggaactttttcattttcaaatctaaaactctgtattcatgattaaccacccattttcttcttccccagcacctgtaaccaccattctacattctatctctgaatttgactaatctaagtacctcatataagtagaatcgtacagcatttatctttttgtgactaccttatttcacttagccagctagttcatcctgttgtagtatgcgacaggatttccttcctttttaagactgaataatattccattgtctctatataccacattttatttatccattcatctgtcagatggaatggttgcttccaccccttggctgttgtaattgaggcctgtttaatataaaatcttccttgtatactttcaaatttatagacaattcagatttgattttttttttttttttttgagatgagatctggctctgttacccagactggagtgcaatggcacaatctcggctcactgtaatatccacctccctggttcagtgattctcccatctcagcctcctgagtagctgggattacaggcatgcgccaccatacccagttaagttttgtattttttgcagagagccatgttgcccgggcttatgggcaactcccgagctctagcaatcctcccaccttgtcctcccaaatagtgtttttttttttttttttttttggttttcttatttttacctctccttagttcatttttctcaactgtataatacatccatatggttttaaaatatacgtaataaaaggtttcctttgtactccatccctcatctactcagttcttacctcagatagtctcctttttttttttttgagaggctaggtcagagtgtggaggcatggttatggctcactgcatccttgacttctgggctcaagcagccctggctcagtgatcctttcatctcagcctcctgagtagctgggaccgtaggtgcacaccaccacgcctggctgatttttgtatattttgtagagatggggtctcactgtgttgcacrggctggtcttgaacttctggtctccagtgatccacctgcctcggcctcccaaagtactgggattacaggcatgagccactacacctggcctcattctattcttaaatttgcacaggtgtccattgtgtagggatgtgttgtaatatatttaaccattcctttgaacttgaataattgaaaattatatttcttacaggttggtgaactcttgaaagattggcgacgtcttaatgttgctataaccagagccaaacataaactgattcttctggggtgtgtgccctcactaaattgctatcctcctttggagaagctgcttaatcatttaaactcagaaaaattaatatcctttttcttctgtatatggtcacatttgattgcactgttgtgagtatttatttgcttgtttaaattaaagctctcactatgttgcttaagctggtcttgaactcctgggctcaagcgatcctcctgtgtaggcctcccaaagtgctgtgattacagatgtgagccacggcccccagcctataacccttttttaatccagaacaaatgattagattaaaatggagtattatttattttatatacagggccttgctttgtcacccaggctgcagtgcagtgatatgatcagagctcactgcaccctcaatctcccaggctaaagtgatcttcctacctcagcctccccagtagctgggcccacaggtgcattccaccatgcccagctaatttttgtatttttttgtaaagacagggtttcaccatgttgcccaggctggttttgaacacctgggctcaagtgattcactcgcctcctcccaaagtgctgggactacaggtgtcagccaccacattcagcctttttttcccccaagaagtggtgcctaacttcactcaggctggagtgtagtggcaggatcactgctcactacagccttgacctggactcaaatagtcgtcccaccttacctttctgagtatctgggaccacaggtacgtaccaccacgcttggctaattttttaaaatttttaatagagaggaggtgagccactgcacctggccttaagataaatcgttttttaaaaatgtgtatgggctgggcctggtggctcacacctgtaatcctagcactttgggaggctgaagcaggtggattgcgaggttgagattgagaccatcctggctaacatggtgaaaccccgtctctactaaaaatacaaaaattagctgggcatggtgacgtgtgcctgtagttccagctactcatgatgctgaggcaggagaatcgcttgcacccgggaggcggaggttgtagtgagccgagatctagcctggtggcagagcgagactccgtctcaaaaaacaaaacaaaacaaaacaaaaaaaacagtgtatgaagttcttaggcttcataagaacttcatacttcttatgaaggtatgaagtaggctaagataaataactctgaggctgggcgtggtggctcacgcttgtaatcccagcactttgggaggctgagacaggcggactacctgaggttgggagttcgagaccagcctgaccagcatggagaaaccctgtctctactaaaaatacaaaattagccgggcatggtggcacatgcctgtaatcccagctactcgggaggctgaggcaggagaatctcttgaacccaggaggcagaggttgcggtgagctgagatcgcaccattgcactccagcctgggtaacaagagtgaaactccatctcagaaaaaaaaaaaaaaaagataaataactcctgttgcttaaaggcataattattcattgaatgccataaagatccttattttttttttgtggtcctgtaagtcaaattacaaaatgttaaataataatgtcataaatttatgccattccatattgtgctaaatatttcttccttaatttattttacatcattgatcttccatcaagagaacatgaaagtctttgccacatattgggtgactttcaaagagaataaaacactatttcccttgccttttcatactagggcagtatctcctctagctagtgcccatacagaaaattctatcaccatacaaaatttaatgcagtatttatgttttaaagcacaggtgtaccgaaaactgtgaaaagtctgaatttatgggttctatgcatgcatttttgcctaacctagagaaagagtttgataaatttttaccagctttgaagatggattaacttttgactttgagctttaaacttttaagtcagacatttcaggactaatttgattttgtagatatcattgtaagaactttatttgaaagactgaataaagggatttgatttgttttcatcatttaagcacagtcttgtgatgatgagaacataagtgtgattcttttctgtattttgaggtccctaatccaaagcccattttgctaggattttttctgctatcagatgtgttttcactctaaacctagtcttttatgacatgaattgattacttcctgttaattttctatcctcccttactatcctccttttttgttttcagtattcagtatttcagtattctagagtagattttgatataaaagaaaataattcttacatcatcttttgcaacaaattttgttttctgaattgataataaatttaaaaagttgattcctattttcacatatgttcatatgcccctatgtttgggggtatcactcagttttcccttttttgtgtaaagatgttttgtaaaacaaaattgtctcaaagtgattatattatatatataaaaagtaacagattttaacaaaggttaaaagattcttggggtaacagattcttctggggcttggaaatcttccatttctcttgagggttttttttaatgagtgttaaatatgttaaaatttttatttctacctcatgtgtttttttaaattattacttgaagttttttatttaataaattttttctactaatggatcttaactgtgtcaattattattaatactgaataataattaaactcagggttatctagcatgttttgttttttttttttttgagacggagtcgcccaggctggagtgcagtggtgcgatcttggctcactgcaagctctgcctcccgggttcacgccattctcctacctcagcctcccgagtagctgggactacaggtgcccgccaccacgcctagctaatttttttttttgtatttttagtagagacggggtttcaccatgttagccaggatggtctccatctcctgacctcgtgatccacccacctcggcctcccaaagtgctgggattacaggcgtgagccaccgcgcccggccgcatgttttctgatagtgacaagtgaagtattgatcatgctagaaagctgaaaccaagcagcattgatattataaagagatttatgaagggcacacaggatgggcttgatcatggagaggggttatagattagataggacaaacgggaaaggttgctgtgatgaacttaaatattggttagatataatgagagtataaatcaggaaggaatctgatggtaattttagttcctgggaatgaaatgaataagaaagtccttttgcttcattacaggtttgtatggcctgaaaagtaaagctccatagaagagaacctggggatgtgttctgtgtttccttttttttttttttttttttggatctgtcttggtgatgagtctagccatttaattgtttaaaagagttaggaagctcggcatggtggctcatgcctgtattcccagcactttgggaggctgaggcaggtggattacctgaggtcaggagctcgagaccagcctggccaacatggtgaaaccctgtctctactaataatacaaaaaaattagccgggtgtggtggccggcgcttgtaatcccagctactcaggaggctcaggcaggagaatcgcttgaacctgggaggcggaggttgcagtgagctgagattgtgccactgcactccagcctggatgacaagagcaagactccatctcaaaacaacaacaacaacaaaaaaaaagtataaagccacgatgcgaagacaatgtggctgttccagtggcccctctcctgaatcagttcagagttcctctcctcttccccctgacttccctcttgctgcctgccatctctgattcctttcttttctccctattcctggctgtctaatggcaggctttccccagagctccaagtctggtttggtcctctttctccttggacagtcactggcttcacccatcacccatgtggctgtttactcaacctgtactacaccctgtcttccaagttctagttatatagctgctttccagccaatgccttcagaatattctgtgaacattttagacttagtacaaagaaattggaaatttccatcttcatttaatgccttcctcctgtgatccctatttctgtaaatgacatcatctcacagttcactgagcttaaagatcttggcataatttttctttctttaaaacatttttggccgggcgcggtggctcacgcctgtaatcccagcactttgggaggccgaggcgggcggatcacgaggtcaggagatcgagaccatcccggctaaaacggtgaaaccccgtctctactaaaaatacaaaaaattagccgggcgtagtggcgggcgcctgtagtcccagctacttgggaggctgaggcaggagaatggcgtgaacccgggaggcggagcttgcagtgagccgagatcccgccactgcactccagcctgggcgacagagcgagactccgtctcaaaaaaaaaaaaacaaaaaacatttttggcctgggcacggtggcttatgcctgtaatcccagcactttgggaggccgaggcgggtggatcaactgaggtcaggagttcgagaccagcctggccaacatggtgaaaccccatctctactaaaaatacaaaaattagccaggtgtggtggcgggcgcctgtaatcccagctactaggtaggctgaggtaggagaatcacttgaacccgggaggcggaggttgcagtgagccgagatcacgccattgcactccagcctgggcaagaagagtgaaactccatctcaaaaaaaaaaacaaaaaaacaaaaaaacaccaaaacatttttccccctgtaattacagagcagtacatgattttagtaagaagttcaaacactacatattttagaaaatgaaatttctggttttttttttttgttttttttttttgagatggagtctagctctgttgcccaggctggagtgcagtggcaaaatctcagctcattgcaacctccacctcccaggttcaagtgattctcctgcctcagactcctgagtagctgggattacaggcacctgccaccacgcccagctaatttttgtatttttagtcgagttgacgtttcactgtgttggccaggctggtctcgaacttctgacctcatgatccgcccacctcggcctcccaaggtgatgggattacaagcataagccaccgtgcctggccagaaaatgaaatttatttgtaatttcatcctttagtaattacatagtttggtctatgatgatctaggctagtatttaaaccaaaattaccacatccacaataagaaatccattttacatcatgactcaatgtagatttgtgtatgaatatgcatctgaaacaatactgtcataaaacaatatttaccctttctgtatatgatataccctgatttgttccactctattccattaaaaacaaagcgtggccgggcgcggtggctcatgcctgtaataacagcactttgcgaggttgaggtgggtggatcacttgaggtcaggagttcgagaccagcctggccaacatggtaaaaccccgtctctactaaaaatagaaaagttagctgggcatggtggtgcatgcctgtaatcccagctacttgggaagctgaggcacaagaatcgcttgaatccaattcaagcaggtggaggtggaggttgcactgagccaagatcatgccattgcactccagcctgggtgacagagcgagactctgtctcaaataaaataaaataaaaaataaataaaaacaaagctaattgcaacctgttaaaattgctttcaggtgccactagtaggtcggaacccatggtttgtaatagtgattattctttaatggcatctttgtgtatttgttgtaaccatatgaaactatttttgttgttcctgtgcatgcctattctgtttcccatttgatctactctctagatttgtctgttcctctgtcaccatttaggcatctctacccacttagactttaagatgccaccttctccaaaaagccttttctgatttttctcccagccaaaagaattatcttcatctttatacagtactataacagtacctatatggagcttcatagcatttactgcttttatttttaattttttttaagagatggagtctctgttggccaggctagagtgcatggcaggatcatagctcactgcaacctcaaattcctggcctcaagcggtccttctgtcacagcctcctgagtaggtaggactaccggtgcacaccactacacccagctaactaactaaaaaaaatttgtttttagaaacagggtcttgctatgttggccaggctagtctggaacttcaggcctcacgcaatcctcctctctcagcctcttgaaagtacttggattacaggcatgagttaccacatctggctgtttactgccttttttttttttttttttttttttgagatggagtcttgctttgttgcccaggctggagtgcagtggtgagatcttggatcactgtagcctctgcctcctgcgtgccagcgattctcctgcctcagccttccaggtagctgggattacaggcacgcgccaccacgcctggctaatttttgtatttatttttagtagagatgaggtttcaccatgttagccagactggtcttgaactcctgactgggtgatcctcccaccttggcctcccaaagtgctgggattacaggcgtgggccactgcacctggcctgtttactgcttttttaaagtagcagttgtaattagtaggatactttaatatttatcaatatttttcatggatattttcccaattgaattaaaccctatagagaacctatcatagatagtctgtgttagcatgtgacccatggcaagtcattgccagaacccacgttttctgattaggaattctgcaattttcctggccattatgtgtatctccttttccccccagcgtggtaacattttccaggtgctatacaaatgttcagaagcattacagttgtcattataagaaaatcatgtcttgagccagctaaagctatggctgaaagctctgtggtatgatgtgacaagctggtccacctggattcagtggactatattgctcatgaaaaagatgacttgtaggctgggtacagtggctcatgcctgtaatcccagcactttggaaggttgagttaggaggatcactagagaccaggagtttgagaccagcctgggcaacatagtgagacctcatctctacaaaaaataaaataaaaattaatggtagctaaatgataactcatgaacacaaagaagggaaaagcaagaccaggtgcagttgctcatgcctgtaatcccaacactttgggaggctgaggaagatagatcacttgagctgaggagttcgagaccatcctggccaacatggtgaaaccctgtcttaaaaaaagaaaaaaaaaaagaagggaacaacagacactggagtctacttgaaggtggaggatgggaggagggagaggagcagaaaagataaccatcggatactggacttaactgggtgatgaaataatctgtacaacaaacccccatgacatgagttcacctatgcaaccaaccttcacatgtaccctcaaacctaaaataaaagcctaaacaaacac
